(19) United States
(12) Patent Application Publication
(10) Pub. No.: US 2025/0018028 A1
(43) Pub. Date: Jan. 16, 2025

(54) SELF-REPLICATING RNA AND USES THEREOF

(71) Applicant: TRUSTEES OF BOSTON UNIVERSITY, Boston, MA (US)

(72) Inventors: Joshua Edward MCGEE, Watertown, MA (US); Jack Rainier KIRSCH, Cambridge, MA (US); Eric BRESSLER, Boston, MA (US); Mark W. GRINSTAFF, Brookline, MA (US); Wilson WONG, Brookline, MA (US); Lidya Yidnekachew Sertse, Boston, MA (US); Kexin Li, Boston, MA (US)

(73) Assignee: TRUSTEES OF BOSTON UNIVERSITY, Boston, MA (US)

(21) Appl. No.: 18/827,183

(22) Filed: Sep. 6, 2024

Related U.S. Application Data
(63) Continuation of application No. 18/512,730, filed on Nov. 17, 2023, now Pat. No. 12,115,217.
(60) Provisional application No. 63/426,597, filed on Nov. 18, 2022.
(60) Provisional application No. 63/460,506, filed on Apr. 19, 2023.
(60) Provisional application No. 63/538,540, filed on Sep. 15, 2023.

(51) Int. Cl. A61K 39/215; A61K 39/00; A61P 37/04; C07K 14/005; C07K 14/575; C07K 16/28; C07K 16/32; C12N 15/86

(52) U.S. Cl. CPC A61K 39/215; A61K 39/4631; A61P 37/04; C07K 14/005; C07K 14/575; C07K 16/2803; C07K 16/32; C12N 15/86; A61K 2039/53; A61K 2239/23; C12N 2770/20022; C12N 2770/36143; C12N 2830/002; C12N 2830/50; C12N 2840/203

(57) ABSTRACT

The technology described herein is directed to compositions and methods for modifying and controlling the activity of cells by expression of proteins from self-amplifying RNA (saRNA). Also described herein are compositions and methods for modifying and controlling the activity of cells by expression of proteins from self-amplifying RNA that is substituted with chemically modified nucleotides.

### CROSS-REFERENCE TO RELATED APPLICATIONS

[0001] This application is a continuation under 35 U.S.C. § 120 of U.S. application Ser. No. 18/512,730, filed Nov. 17, 2023, which claims benefit under 35 U.S.C. § 119(e) of U.S. Provisional Application No. 63/538,540 filed Sep. 15, 2023, U.S. Provisional Application No. 63/460,506 filed Apr. 19, 2023, and U.S. Provisional Application No. 63/426,597 filed Nov. 18, 2022, the contents of each of which are incorporated herein by reference in their entireties.

### GOVERNMENT SUPPORT

[0002] This invention was made with government support under Contract No. CA265713-02 and Grant No. R01 AR079489 awarded by the National Institutes of Health. The government has certain rights in the invention.

### SEQUENCE LISTING

[0003] The instant application contains a Sequence Listing which has been submitted in XML format via Patent Center and is hereby incorporated by reference in its entirety. Said XML copy, created on Sep. 20, 2024, is named 701586-000105USC1_SL.xml and is 1,760,626 bytes in size.

### TECHNICAL FIELD

[0004] The technology described herein relates to methods and compositions for the modification and control of cell activity via self-replicating RNA.

[0005] The technology described herein relates to methods of use and compositions of self-amplifying RNA that is highly or fully substituted with chemically modified nucleotides.

### BACKGROUND

[0006] Adoptive cell therapy represents a promising strategy for the treatment of a variety of cancers. Today, five approved adoptive cell therapies exist in for the treatment of leukemia, lymphoma, and multiple myeloma. Additionally, applications of adoptive cell therapy are being explored beyond oncology. Although the clinical outcomes of the approved therapies are promising, many challenges associated with ex vivo cell engineering remain. The isolation of cells, genetic engineering, and expansion protocols are costly and time consuming. Additionally, the genetic modification of cells poses the risk of off-target genomic editing. An attractive alternative is to reprogram cells either ex vivo or in vivo with messenger RNA (mRNA). In the context of oncology, the use of mRNA programmed immune cells has shown efficacy in a limited number of cancer models. However, some challenges with the level of expression and duration of expression were reported. As a result, repeat dosing is often required to achieve a functional benefit. By contrast, self-replicating RNA can be used to express therapeutic programs at a higher level and over a longer duration. Moreover, self-replicating RNA systems can be utilized for the ex vivo or in vivo modification of cells.

[0007] To ensure safety and improve the activity of engineered cell therapies, control is desired. Control is often accomplished by including components that can be externally controlled to turn activity on or off A common example of control in cell therapy is a kill switch that can be included in engineered cells. If the engineered cells pose risks, they can be killed off by the infusion of a small molecule that activates the kill switch present in the engineered cells. There are additional strategies to control the activity of engineered cells by utilizing engineered proteins with externally controlled behavior. In the context of oncology, a series of drug-regulated chimeric antigen receptors exist. The resulting activity of CAR-T cells manufactured with drug-controlled receptors is dependent on the dose of the control molecule that is administered. An additional strategy to control the activity of cells is to utilize logic computation. By including components that interact with one another, circuits that sense a variety of signals and logically respond can be created. This results in the ability to create therapies with enhanced specificity by requiring combinations of input signals to be satisfied before the therapeutic activity is conducted. The complexity of such logic computation circuits is often limited by the size capacity of genetic engineering methods. The development of methods to modify cells with controllable activity in a rapid, scar-free manner with self-replicating RNA is highly desired.

[0008] Furthermore, the original discovery of how modified nucleotides enable mRNA to evade the immune system by Karikó and Weissman paved the way for the field of mRNA therapeutics (Karikó, K. Immunity, 2005. PMID: 16111635)(Karikó, K. Molecular Therapy, 2008. PMID: 18797453). mRNA containing chemically modified nucleotides are significantly less immunogenic (Karikó, K. Molecular Therapy, 2008. PMID: 18797453)(Kormann, M. Nature Biotechnology, 2011. PMID: 21217696)(Karikó, K. Immunity, 2005. PMID: 16111635). Currently, the clinical-gold standard in mRNA therapeutics is the complete substitution of uridine for N1-methylpseudouridine (m1Ψ) which has the greatest impact on the suppression of the type I interferon (IFN) response traditionally elicited by dsRNA and ssRNA (Karikó, K. Immunity, 2005. PMID: 16111635). On a molecular level, modified nucleotides alter the stability or accessibility of specific base pairs, change hydrogen bonding patterns, and shift RNA hydrophobicity. Along with altering RNA stability, some of these new interactions change RNA primary or secondary structure such that RNA-protein interactions are either stabilized or inhibited (Kierzek, E. Nature Communications, 2022. PMID: 35277476)(Harcourt, E. Nature, 2017. PMID: 28102265)(Davis, D. Nucleic Acids Research, 1995. PMID: 8559660). It is in part through these mechanisms that modified nucleotides imbue RNA with immune evasion properties. However, these same RNA-RNA and RNA-protein interactions are essential for self-amplifying RNA (saRNA) function.

[0009] saRNA is a type of RNA which has the ability to replicate and amplify itself, in situ. This is accomplished by encoding both an RNA dependent RNA polymerase (RdRp) as well as the protein of interest (Bloom, K. Gene Therapy, 2021. PMID: 33093657). Some of the advantages of saRNA include increased potency per g RNA compared to non-replicating mRNA (nrRNA) and extended duration of action (Minnaert, K. Advanced Drug Delivery Reviews, 2021. PMID: 34324884)(Geall, A. Expert Opinion on Drug Discovery, 2022. PMID: 36384351). The RdRp encoded by saRNA recognizes conserved secondary structures and sequences, referred to as the conserved sequence elements and sub genomic promoter (SGP), which allow for transcription of both negative and positive strand saRNA as well as the mRNA encoding the cargo of interest. The current understanding of the saRNA field is that the incorporation of modified nucleotides into saRNA results in inactivation of replicase activity and the abrogation of downstream efficacy (Geall, A. Expert Opinion on Drug Discovery, 2022. PMID: 36384351)(Voigt, E. NPJ vaccines, 2022. PMID: 36323666)(Novartis AG, Ser. No. 12/831,252)(Kairuz, D. Frontiers in Immunology, 2022. PMID: 36353641)(Minnaert, K. Advanced Drug Delivery Reviews, 2021. PMID: 34324884). These works teach that incorporation of modified nucleotides at >25% substitution results an saRNA that does not produce sufficient antigen to be therapeutically effective.

[0010] There have been 10+ clinical trials employing saRNA since 2015 and though preclinical evidence is promising, human data has demonstrated lower seroconversion, lower neutralizing antibodies levels, and decreased production of antibodies after booster compared to non-replicating mRNA (Geall, A. Expert Opinion on Drug Discovery, 2022. PMID: 36384351). One hypothesized reason for this, is the early and intense activation of the innate immune response by saRNA containing unmodified nucleotides, which hinders both saRNA replication and the launch of cargo from the saRNA SGP. In knockout mice deficient for type I IFN α and β receptor subunit 1, saRNA resulted in higher IgG specific antibody titers and seroconversion compared to WT mice (Pepini, T. The Journal of Immunology, 2017. PMID: 28416600)(Zhong, Z. Nano Today, 2018. DOI: 10.1016/J.NANTOD.2018.10.005). Recently, corticosteroid immune suppression was explored as a co-therapy to minimize innate immune response, but ended up suppressing seroconversion. This same study did demonstrate that removal of dsRNA contaminants, which activate TLR3 and stimulate type I IFN expression, increased vaccine immunogenicity (Zhong, Z. Molecular Therapy, 2021. PMID: 33484964). A Type I IFN suppression of saRNA is further supported by the fact that IM is the optimal delivery route for saRNA, as intradermal injection has been shown to elicit higher type I IFN response than IM (Zhong, Z. Vaccines, 2019. PMID: 31450775). In sum, previous research points towards the potential for substantially increased saRNA efficacy if the early interferon response could be overcome. Part of what makes saRNA so potent as a vaccine candidate is that it acts as its own adjuvant. However, to achieve a balance between adjuvancy and IFN-mediated suppression of saRNA launch, controlling the early IFN response is essential (Zhong, Z. Nano Today, 23. (2018) DOI: 10.1016/J.NANTOD.2018.10.005). Without a mechanism to evade early recognition during endosomal escape and preliminary expression, saRNA may continue to falter in the clinic.

[0011] Although considerable efforts have been made to develop self-amplifying RNAs as therapeutics, there still remains a need to increase the stability and efficacy of self-amplifying RNAs to achieve this objective.

### SUMMARY

[0012] The technology described herein is directed to self-replicating RNA systems. In particular, described herein are methods and compositions for utilizing self-replicating RNA to modify cells and introduce elements that can be controlled externally or establish logic computation control. Self-replicating RNA is comprised of sequences derived from an RNA virus and additional cargo sequences. The external control is established by utilizing cargo protein domains that are responsive to external inputs (e.g., small molecules, light, proteins). Logic computation control is established by including components that sense external or internal inputs and interact with each other directly or indirectly to perform logic operations.

[0013] Described herein are general frameworks for modifying cells and equipping them with controllable behavior via self-replicating RNA: (1) expression of cargo protein(s) in cells; (2) external control of cell behavior by administration of external factors that increase or decrease activity of cargo protein(s); (3) internal control of cell behavior by logic computation circuits that sense inputs and perform logic computation.

[0014] In some embodiments, self-replicating RNA is created by utilizing sequences derived from the viral elements capable of copying and generating additional RNA. Exemplary viruses include alphaviruses, flaviviruses, measles viruses, and rhabdoviruses. In particular embodiments, self-replicating RNA is created by utilizing sequences derived from Venezuela Equine Encephalitis Virus (VEEV), Semliki Forest Virus (SFV), Sindbis Virus (SIN), Kunjin Virus (KUN), Measles virus (MV), Rabies virus (RABV), and Vesicular Stomatitis virus (VSV). In a specific embodiment, the replication can be the result of inclusion of conserved noncoding sequence elements on the 5′ and 3′ ends of the RNA strand in addition to the inclusion of coding sequences for the proteins nsp1, nsp2, nsp3, and nsp4. The expression of any genetically encodable protein is enabled by placing the coding sequence after a subgenomic promoter sequence or an internal ribosome entry site (IRES) sequence.

[0015] In one aspect, described herein is a self-amplifying RNA (saRNA) comprising from 5′ to 3′: (a) a 5′ cap; (b) non-structural protein 1 (nsp1), non-structural protein 2 (nsp2), non-structural protein 3 (nsp3), and/or non-structural protein 4 (nsp4), each derived from at least one virus; (c) a subgenomic promoter (SGP) derived from at least one virus; (d) a 5′ untranslated region (UTR) derived from at least one virus; (e) at least one cargo of interest; (f) a 3′ untranslated region (UTR) derived from at least one virus; and (g) a poly-A tail.

[0016] In one embodiment of any aspect herein, the self-replicating RNA is generated by in vitro transcription. In other embodiments, the self-replicating RNA is delivered to cells as plasmid DNA that is transcribed into RNA and contains the necessary sequences for replication.

[0017] In one embodiment of any aspect herein, the RNA contains a 5′ cap structure.

[0018] In one embodiment of any aspect herein, the RNA contains a 3′ poly-A tail.

[0019] In one embodiment of any aspect herein, the RNA contains a 5′ UTR, a 3′ UTR, or a combination of both.

[0020] In one embodiment of any aspect herein, the inclusion of sequence elements from the VEEV virus results in enhanced expression of a functional protein over a longer duration than conventional mRNA.

[0021] In one embodiment of any aspect herein, a functional protein is expressed from self-replicating RNA that contains the protein coding sequence downstream of a subgenomic promoter.

[0022] In one embodiment of any aspect herein, a functional protein is expressed from self-replicating RNA that contains the protein coding sequence downstream of an internal ribosome entry site (IRES) sequence.

[0023] In one embodiment of any aspect herein, the functional protein is a chimeric antigen receptor.

[0024] In one embodiment of any aspect herein, the functional protein is a chimeric antigen receptor with a protease domain that is responsive to a protease inhibitor.

[0025] In one embodiment of any aspect herein, the functional protein is a chimeric antigen receptor with a domain that interacts with a small molecule. The stability of the receptor is modulated by known and unknown mechanisms in the presence of the small molecule.

[0026] Another aspect details a method, wherein the activity of the functional protein is dependent on the concentration of an administered small molecule.

[0027] Another aspect details a method, wherein the activity of the functional protein is dependent on the concentration of multiple administered small molecules.

[0028] In one embodiment of any aspect herein, the functional protein is a chimeric antigen receptor with a domain that interacts with a protein. The stability of the receptor is modulated by known and unknown mechanisms in the presence of the protein.

[0029] Another aspect details a method, wherein the activity of the functional protein is dependent on the concentration of an administered protein.

[0030] Another aspect details a method, wherein the activity of the functional protein is dependent on the concentration of multiple administered proteins.

[0031] In one embodiment of any aspect herein, the level of expression of the functional protein is equal to or greater than levels of expression resulting from other methods to establish constitutive expression of a protein.

[0032] In one embodiment of any aspect herein, multiple proteins are expressed from the same self-replicating RNA strand by inclusion of an IRES sequence between the coding sequences of each protein.

[0033] In one embodiment of any aspect herein, multiple proteins are expressed from the same self-replicating RNA strand by inclusion of a 2A sequence between the coding sequences of each protein.

[0034] In one embodiment of any aspect herein, the expression level of multiple proteins expressed from the same self-replicating RNA are equal to or greater than levels of expression resulting from other methods to establish constitutive expression of multiple proteins.

[0035] In one embodiment of any aspect herein, multiple chimeric antigen receptors with opposing functions are expressed from the same self-replicating RNA strand.

[0036] Another aspect details a method, wherein the activity of the resulting cell is dependent on external signals that are sensed by multiple proteins with differing functions. The resulting activity conducted by the cell is dependent on the presence or lack of the sensed external signals. In some embodiments, small molecules are administered as the external signal. Non-limiting examples of other external signals that can be used to control activity include light, ultrasound, proteins, ligands, antibodies, antibody fragments etc.

[0037] In one embodiment of any aspect herein, a functional protein with expression enhancing ability either by known or unknown mechanisms is used to enhance the level and duration of expression is co-expressed.

[0038] In one embodiment of any aspect herein, self-replicating RNA is delivered to cells via electroporation.

[0039] In one embodiment of any aspect herein, self-replicating RNA is delivered to cells via nucleofection.

[0040] In one embodiment of any aspect herein, RNA is delivered to cells via lipid nanoparticles.

[0041] In one embodiment of any aspect herein, RNA is delivered to cells via nanoparticles.

[0042] In one embodiment of any aspect herein, RNA is delivered to a specified cell type by delivery with a lipid nanoparticle containing an antibody on the nanoparticle surface.

[0043] In one embodiment of any aspect herein, the function of the chimeric antigen receptor is to activate immune cells.

[0044] In one embodiment of any aspect herein, the function of the chimeric antigen receptor is to inhibit immune cells.

[0045] In one embodiment of any aspect herein, a reporter protein is co-expressed along with cargo protein to measure the levels of expression resulting from the self-replicating RNA.

[0046] In one embodiment of any aspect herein, multiple cell types are modified with self-replicating RNA.

[0047] In one embodiment of any aspect herein, one or more cell types are modified with self-replicating RNA.

[0048] In one embodiment of any aspect herein, one or more cell types are modified with self-replicating RNA prior to administration to a patient.

[0049] In one embodiment of any aspect herein, one or more cell types are modified with self-replicating RNA where the cells are in the patient.

[0050] In one embodiment of any aspect herein, one or more cell types modified with self-replicating RNA are administrated to a patient via intraosseous (IO), intraperitoneal (IP), subcutaneous (SC), intravenous (IV), intramuscular (IM), and intraarticular or via inhalation or topical.

[0051] Previous studies have suggested that the level of substitution of SaRNAs with modified nucleotides should be less than 25% otherwise the expression of transgenes encoded by SaRNAs expression decreases relative to comparable SaRNAs without such modifications (see, e.g., Voigt, E. NPJ vaccines, 7. (2022) (U.S. Ser. No. 12/831,252) (WO2011005799) (U.S. Ser. No. 10/532,067B2), (U.S. Ser. No. 11/291,682B2), (US20220054525A1), (U.S. Ser. No. 10/487,332B2), (US20200048636A1), (US20220056449A1), (EP3964584A1), (WO2012006376), (US20220192997A1), (U.S. Ser. No. 11/058,762B2), (US20210290755A1), (US20140242152), (US20220313815A1), (US20210347828A1), (WO2022137128A2), (US20140271829A1). For example, U.S. Ser. No. 12/831,252 teaches that incorporation of 0.01%-25% modified nucleotide is the optimal substitution ratio that maintains expression of a transgene cargo, either reporter construct or vaccine antigen. At higher substitution ratios, expression of the transgene cargo is decreased.

[0052] The invention is based, in part, upon the discovery that certain modified nucleotides can be incorporated into saRNA at levels above 25%, including greater than 50%, 60%, 70%, 80%, 90%, 95%, 96%, 97%, 98%, 99%, 99.1%-100% or even 100%, and that the resulting saRNA can still express cargo or cargos of interested encoded on the saRNA. Furthermore, under certain circumstances, the level of expression of transgenes encoded by the saRNA can even be higher than the level of expression of comparable saRNA without such modifications. These specific modifications allow for maintenance of self-amplifying function of the saRNA as well as maintaining expression of the cargo protein encoded by one or more cargos.

[0053] Described herein are general frameworks for expressing cargo from self-amplifying RNA that comprises modified nucleotides at greater than 25% substation and is able to maintain or increase expression capabilities compared to unmodified saRNA. This enables expressing vaccine antigen, protein replacement therapies, antibodies, enzymes, or modifying cells and equipping them with controllable behavior via modified self-replicating RNA: (1) expression of cargo protein(s) in cells; (2) external control of cell behavior by administration of external factors that increase or decrease activity of cargo protein(s); (3) internal control of cell behavior by logic computation circuits that sense inputs and perform logic computation.

[0054] Disclosed herein are self-amplifying RNAs containing greater than 25% substitution of a given nucleotide with modified nucleotides. These highly-substituted saRNA are not only capable of maintaining saRNA functionality, but confer suppression of innate immune activation. Additionally, these highly-substituted saRNA are more efficacious, increasing cargo expression and transfection efficiency. The saRNA described herein have the potential to unlock the next frontier in RNA therapeutics that has been hampered by the inherent immunogenicity of the constructs; this work provides a blueprint for the modification and potentiation of saRNA therapeutics as vaccines, long-lasting cell therapies, protein replacement therapies, and any other conceived embodiment of RNA therapeutics.

[0055] In some embodiments, self-replicating RNA is created by utilizing sequences derived from the viral elements capable of copying and generating additional RNA. Exemplary viruses include alphaviruses, flaviviruses, measles viruses, coronaviruses and rhabdoviruses. In particular embodiments, self-replicating RNA is created by utilizing sequences derived from Venezuela Equine Encephalitis Virus (VEEV), Semliki Forest Virus (SFV), Sindbis Virus (SIN), Kunjin Virus (KUN), Measles virus (MV), Rabies virus (RABV), and Vesicular Stomatitis virus (VSV). In a specific embodiment, the replication can be the result of inclusion of conserved noncoding sequence elements on the 5′ and 3′ ends of the RNA strand in addition to the inclusion of coding sequences for the proteins nsp1, nsp2, nsp3, and nsp4. The expression of any genetically encodable protein is enabled by placing the coding sequence after a subgenomic promoter sequence or an internal ribosome entry site (IRES) sequence. In addition, noncoding RNA can be transcribed by placement of a microRNA or siRNA sequence after the subgenomic promoter.

[0056] In one aspect, described herein is a self-amplifying RNA (saRNA) comprising at least 25% modified nucleotides, wherein the modified nucleotides comprise a pyrimidine nucleoside phosphate with a moiety on carbon 5 of the pyrimidine, wherein the moiety is selected from the group consisting of methyl, ethyl, propyl, trifluoromethyl, hydroxymethyl, hydroxyethyl, and hydroxypropyl functional groups, and at least one cargo of interest.

[0057] In some embodiments of any of the aspects, the modified nucleotides comprise 5-methylcytidine, 5-methyluridine, 5-hydroxymethyluridine, 5-hydroxymethylcytidine or a combination thereof.

[0058] In some embodiments of any of the aspects, the saRNA expresses the cargo at a level greater than or equal to that of a corresponding saRNA with less than 25% modified nucleotides.

[0059] In one embodiment of any aspect herein, the self-amplifying RNA is comprised of nucleotides wherein one or more of the unmodified nucleotides comprising cytidine, adenosine, uridine, and guanosine, is replace with a percentage of modified analog to the corresponding base, where the percentage is at least 25%, e.g., 25-100%, 30-100%, 40-100%, 50-100%, 60-100%, 70-100%, 80-100% or 90-100%, 25-95%, 30-95%, 40-95%, 50-95%, 60-95%, 70-95%, 80-95%, 25-90%, 30-90%, 40-90%, 50-90%, 60-90%, 70-90%, or 80-90%, 25-30%; 30-35%; 40-45%; 45-50%; 50-55%; 55-60%; 60-65%; 65-70%; 70-75%; 75-80%; 80-85%, 85-90%, 90-95%, 95-99%, 99%-100%, or 100%. In some embodiments of any of the aspects, the level of substitution of the modified nucleotides is: 25%-50%; 51%-75%; 75%-99%; 99.1%-99.9%; or 100%.

[0060] In one embodiment of any aspect herein, a self-amplifying RNA (saRNA) encodes a cargo of interest, wherein the saRNA comprises a level of substitution of a given nucleotide with a modified nucleotide greater than 25%, where the modified nucleotide is selected from the group consisting of 5-methylcytidine, 5-methyluridine, and 5-hydroxymethylcytidine, and optionally the saRNA expresses the cargo at a level greater than or equal to that of the same saRNA without the modified nucleotide.

[0061] In one embodiment of any aspect herein, a self-amplifying RNA (saRNA) encodes a cargo of interest, wherein the saRNA comprises a level of substitution of a given nucleotide with a modified nucleotide greater than 25%, where the modified nucleotide is selected from the group consisting of 5-methylcytidine, 5-methyluridine, 5-hydroxymethyluridine, and 5-hydroxymethylcytidine, and optionally the saRNA expresses the cargo at a level greater than or equal to that of the same saRNA without the modified nucleotide.

[0062] In one embodiment of any aspect herein, a self-amplifying RNA (saRNA) encodes a cargo of interest, wherein the saRNA comprises a level of substitution of a given nucleotide with a modified nucleotide greater than 25%, where the modified nucleotide is comprised of a pyrimidine nucleoside triphosphate with a moiety on the 5 carbon, wherein the moiety is selected from a list comprising methyl, ethyl, propyl, trifluoromethyl, hydroxymethyl, hydroxyethyl, or hydroxypropyl functional groups, and optionally the saRNA expresses the cargo at a level greater than or equal to that of the same saRNA without the modified nucleotide.

[0063] In one embodiment of any aspect herein, the substitution with 5-methyluridine and one or both, 5-methylcytidine and 5-hydroxymethylcytidine, occurs in the same saRNA molecule.

[0064] In one embodiment of any aspect herein, the substitution with 5-methyluridine or 5-hydroxymethyluridine, and one or both of 5-methylcytidine and 5-hydroxymethylcytidine, occurs in the same saRNA molecule.

[0065] In one embodiment of any aspect herein, the initiating nucleotide, the nucleotide directly proximal to the 5′ cap, is an adenosine or adenosine analog.

[0066] In one embodiment of any aspect herein, the initiating nucleotide, the nucleotide directly proximal to the 5′ cap, is a guanosine or guanosine analog.

[0067] In one embodiment of any aspect herein, the initiating nucleotide, and optionally the subsequent nucleotide, of the saRNA is methylated at the 2′O position of the ribose.

[0068] In some embodiments of any of the aspects, the initiating nucleotide comprises: (a) an adenosine or adenosine analog, and the initiating nucleotide of the saRNA is methylated at the 2′O position of the ribose (Cap1); (b) an adenosine or adenosine analog, and the initiating nucleotide and the subsequent nucleotide of the saRNA are both methylated at the 2′O position of the ribose (Cap2); (c) a guanosine or guanosine analog, and the initiating nucleotide of the saRNA is methylated at the 2′O position of the ribose (Cap1); or (d) a guanosine or guanosine analog, and the initiating nucleotide and the subsequent nucleotide of the saRNA are both methylated at the 2′O position of the ribose (Cap2).

[0069] In one embodiment of any aspect herein, the saRNA contains components derived from the Venezuela Equine Encephalitis Virus (VEEV), Semliki Forest Virus (SFV), Sindbis Virus (SIN), Kunjin Virus (KUN), Measles virus (MV), Coronavirus (CoV), Rabies virus (RABV), or Vesicular Stomatitis virus (VSV).

[0070] In some embodiments of any of the aspects, the saRNA comprises from 5′ to 3′: (a) a 5′ cap; (b) non-structural protein 1 (nsp1), non-structural protein 2 (nsp2), non-structural protein 3 (nsp3), and/or non-structural protein 4 (nsp4), each derived from at least one virus; (c) a subgenomic promoter (SGP) derived from at least one virus; (d) 5′ untranslated region (UTR) derived from at least one virus; (e) the at least one cargo of interest; (f) a 3′ untranslated region (UTR) derived from at least one virus; and (g) a poly-A tail.

[0071] In some embodiments of any of the aspects, the saRNA further comprises at least one 5′ conserved sequence element (CSE) and/or 3′ at least one conserved sequence element (CSE) derived from at least one virus.

[0072] In some embodiments of any of the aspects, the at least one virus is an alphavirus.

[0073] In some embodiments of any of the aspects, the at least one virus is selected from the group consisting of: Venezuela Equine Encephalitis Virus (VEEV), Semliki Forest Virus (SFV), Sindbis Virus (SIN), Chikungunya Virus (CHIKV), Eastern Equine Encephalitis Virus (EEEV), Mayaro Virus (MAYV), Getah Virus (GETV), Ross River Virus (RRV), Una Virus (UNAV), Middleburg Virus (MIDV), O'nyong nyong virus (ONNV), Barmah Forest Virus (BFV), Mucambo Virus (MUCV), Tonate Virus (TONV), Everglades Virus (EVEV), Rio Negro Virus (RNV), Turnip Rosette Virus (TROV), Highlands J Virus (HJV), Western Equine Encephalitis Virus (WEEV), Fig Mosaic Emaravirus (FMV), Aura Virus (AURAV), Kunjin Virus (KUN), Measles virus (MV), Coronavirus (CoV), Rabies virus (RABV), and Vesicular Stomatitis virus (VSV).

[0074] In one embodiment of any aspect herein, the saRNA expresses a cargo that is a protein or multiple proteins of viral, bacterial, protozoan, mammalian, or plant in origin.

[0075] In some embodiments of any of the aspects, the cargo comprises: a chimeric antigen receptor (CAR) comprising an extracellular domain that specifically binds to an antigen of interest; a ligand, a cell surface receptor, a transcription factor, a cytokine, a chemokine, an enzyme, and/or an antibody or fragment thereof; a bispecific T cell engager (BiTE); at least one non-coding RNA; at least one vaccine-associated antigen comprising at least one protein encoded by a genome of a virus; comprises at least one transcription factor; at least one growth factor and/or cytokine; one or both of Pappalysin-A1 (PAPPA1) and Pappalysin-A2 (PAPPA2); at least one interleukin and/or a cognate receptor(s) of the interleukin and/or receptor sub-units for the interleukin; at least one enzyme with antioxidant activity; glucagon-like peptide-1 (GLP-1) or a fragment thereof.

[0076] In one embodiment of any aspect herein, the saRNA expresses a chimeric antigen receptor containing an extracellular domain that senses input signals.

[0077] In one embodiment of any aspect herein, the saRNA expresses a ligand, a cell surface receptor, a transcription factor, a cytokine, a chemokine, an enzyme, an antibody, or other protein with biological activity.

[0078] In one embodiment of any aspect herein, the saRNA expresses cargo or cargos of interest comprising a domain or domains responsive to an external input.

[0079] In one embodiment of any aspect herein, the saRNA transcribes one or multiple non-coding RNA selected from a list comprising siRNA, shRNA, or microRNA.

[0080] In one embodiment of any aspect herein, the cargo of interest is one or multiple vaccine associated antigens, wherein the vaccine associated antigen is one or multiple proteins encoded on the genomes of viruses selected from a list comprising respiratory syncytial virus, hemagglutinin virus, human immunodeficiency virus, influenza virus, zika virus, sudden acute respiratory syndrome coronavirus 2, human papillomavirus, herpes virus, rotavirus, chicken pox, dengue virus, hepatitis A virus, hepatitis virus B, rubella virus, poliovirus, or rabies virus.

[0081] In one embodiment of any aspect herein, the cargo or cargos encoded by the saRNA is one or more chimeric antigen receptors selected from the list comprising CD19, CD22, CD30, b-cell maturation antigen (BCMA), disialoganglioside GD2, human estrogen receptor 2 (HER2), GPR87, Fibroblast Activator Protein (FAP), CD20, receptor tyrosine kinase-like orphan receptor 1 (ROR1), carcinoembryonic antigen (CEA), mesothelin (MSLN), prostate-specific membrane antigen (PSMA), EGFRvIII, IL13Rα2, NKG2D.

[0082] In one embodiment of any aspect herein, the cargo or cargos encoded by the saRNA is one or more transcription factor, including those selected from the list Oct3/4, Sox2, Klf4, & c-Myc.

[0083] In one embodiment of any aspect herein the cargo or cargos encoded by the saRNA is one or more growth factor or cytokine, selected from the list comprising platelet-derived growth factor (PDGF), erythropoietin (EPO), vascular endothelial growth factor (VEGF), transforming growth factor-β1 (TGF-β1), fibroblast growth factor (FGF), human relaxin-2 (RLX2), alpha-melanocyte-stimulating hormone (alpha-MSH), insulin-like growth factor-I (IGF-I), epidermal growth factor (EGF), nerve growth factor (NGF), granulocyte-monocyte colony-stimulating factor (GMCSF), Thrombopoietin (TPO), Bone morphogenic protein (BMP), hepatocyte growth factor (HGF), growth/differentiation factor (GDF), Neurotrophins, migration stimulating factor (MSF), sarcoma growth factor (SGF).

[0084] In one embodiment of any aspect herein, the cargo or cargos encoded by the saRNA is one or both Pappalysin-A1 (PAPPA1) and Pappalysin-A2 (PAPPA2).

[0085] In one embodiment of any aspect herein, the cargo or cargos encoded by the saRNA is one or more interleukin(s) or their cognate receptors and receptor sub-units, selected from the list comprising IL-2, IL-4, IL-7, IL-10, IL-13, and IL-15.

[0086] In one embodiment of any aspect herein, the cargo or cargos encoded by the saRNA is one or more enzyme with antioxidant activity, selected from a list comprising phospholipid hydroperoxide glutathione peroxidase, superoxide dismutase-1, and superoxide dismutase-2; Bruton's tyrosine kinase; adenosine deaminase; ecto-nucleoside triphosphate diphosphydrolase.

[0087] In one embodiment of any aspect herein, the invention is pharmaceutical composition comprising a saRNA and a pharmaceutically acceptable carrier.

[0088] In one aspect described herein is a method of expressing at least one cargo of interest in a cell, the method comprising contacting a cell with at least one saRNA as described herein. In one embodiment of any aspect herein, a cell is transfected with the described saRNA.

[0089] In one embodiment of any aspect herein, the cargo of the described saRNA is expressed in a cell (e.g. a eukaryotic cell).

[0090] In one aspect described herein is a method of expressing at least one cargo in a subject in need thereof, the method comprising administering to the subject an effective amount of a pharmaceutical composition comprising or expressing at least one saRNA as described herein. In one embodiment of any aspect herein, one or more preselected cargos are expressed in a subject in need thereof, this embodiment comprising administering to a subject (e.g., a human, a livestock) an effective amount of saRNA.

[0091] In one embodiment of any aspect herein, the saRNA maintains or increases initial saRNA replication and cargo expression compared to an unmodified saRNA of the same dose.

[0092] In one embodiment of any aspect herein, the expression of the cargo or cargos of interest encoded by a saRNA is equivalent or increased compared to that of an unmodified saRNA.

[0093] In one embodiment of any aspect herein, the transfection efficiency of a self-amplifying RNA molecule is increased compared to that of an unmodified saRNA.

[0094] In one embodiment of any aspect herein, the early interferon response resulting from introduction of the saRNA is decreased compared to that of unmodified saRNA.

[0095] In one embodiment of any aspect herein, the length of time over which cargo is expressed at a detectable level from the saRNA is increased compared to that of unmodified saRNA.

[0096] In one embodiment of any aspect herein, the saRNA is delivered to a human cell.

[0097] In one embodiment of any aspect herein, the saRNA is administrated to a subject that has cancer.

[0098] In one embodiment of any aspect herein, the saRNA is administrated to a subject in need of vaccination.

[0099] In one embodiment of any aspect herein, the saRNA is administrated to a subject in need of protein replacement therapy.

[0100] In one embodiment of any aspect herein, the saRNA is administrated to a subject in need of antibody therapy.

[0101] In one embodiment of any aspect herein, the saRNA permits tissue, organ, or cell-type specific expression of the cargo.

[0102] In one embodiment of any aspect herein, the saRNA comprises greater than 50% substitution of uridine with 5-methyluridine to facilitate kidney specific expression of the cargo.

[0103] In one embodiment of any aspect herein, the saRNA modulates cellular differentiation of a cell containing the saRNA at a level equivalent to or greater than the level of modulation achieved with the unmodified saRNA at an equivalent dose.

[0104] In a preferred embodiment, the self-amplifying RNA highly substituted with modified nucleotides expresses more cargo when compared to an unmodified saRNA.

[0105] In a preferred embodiment of any aspect herein, the self-replicating RNA is generated by in vitro transcription.

[0106] In one embodiment of any aspect herein, the RNA contains a 5′ cap structure.

[0107] In a preferred embodiment of any aspect herein, the 5′ cap structure is directly upstream of an adenosine nucleotide or analog.

[0108] In a preferred embodiment of any aspect herein, the 5′ cap structure is directly upstream of an guanosine nucleotide or analog.

[0109] In one embodiment of any aspect herein, the RNA contains a 3′ poly-A tail.

[0110] In one embodiment of any aspect herein, the RNA contains a 5′ UTR, a 3′ UTR, or a combination of both.

[0111] In one embodiment of any aspect herein, the inclusion of select modified nucleotides increases or enhances expression of a cargo protein compared to un-substituted saRNA.

[0112] In one embodiment of any aspect herein, the inclusion of select unmodified nucleotides increases or enhances the transfection efficiency of the saRNA into cells of interest.

[0113] In one embodiment of any aspect herein, a cargo protein is expressed from self-replicating RNA that contains the protein coding sequence downstream of a subgenomic promoter.

[0114] In one embodiment of any aspect herein, a functional protein is expressed from self-replicating RNA that contains the protein coding sequence downstream of an internal ribosome entry site (IRES) sequence.

[0115] In one embodiment of any aspect herein, the cargo protein is a chimeric antigen receptor.

[0116] In a preferred embodiment, the vaccine associated antigen is a protein encoded on the viral genome of any strain of respiratory syncytial virus, hemagglutinin virus, human immunodeficiency virus, influenza virus, zika virus, sudden acute respiratory syndrome coronavirus 2, human papillomavirus, herpes virus, rotavirus, chicken pox, dengue virus, hepatitis A virus, hepatitis virus B, rubella virus, poliovirus, or rabies virus.

[0117] In a preferred embodiment, the vaccine associated antigen is a protein encoded on the genome of any tuberculosis, diptheriae, meningococcal, pneumococcal or tetani bacteria.

[0118] In one embodiment of any aspect herein, the functional protein is a chimeric antigen receptor.

[0119] In one embodiment of any aspect herein, the functional protein is a chimeric antigen receptor with a protease domain that is responsive to a protease inhibitor.

[0120] In one embodiment of any aspect herein, the functional protein is a chimeric antigen receptor with a domain that interacts with a small molecule. The stability of the receptor is modulated by known and unknown mechanisms in the presence of the small molecule.

[0121] Another aspect details a method, wherein the activity of the functional protein is dependent on the concentration of an administered small molecule.

[0122] Another aspect details a method, wherein the activity of the functional protein is dependent on the concentration of multiple administered small molecules.

[0123] In one embodiment of any aspect herein, the level of expression of the functional protein from highly substituted saRNA is equal to or greater than levels of expression resulting from un-substituted saRNA.

[0124] In one embodiment of any aspect herein, the early immune response elicited by highly substituted saRNA is less than that of un-substituted saRNA.

[0125] In one embodiment of any aspect herein, multiple chimeric antigen receptors with opposing functions are expressed from the same highly substituted self-replicating RNA strand.

[0126] Another aspect details a method, wherein the activity of the resulting cell is dependent on external signals that are sensed by multiple proteins with differing functions. The resulting activity conducted by the cell is dependent on the presence or lack of the sensed external signals. In some embodiments, small molecules are administered as the external signal. Non-limiting examples of other external signals that can be used to control activity include light, ultrasound, proteins, nucleic acids, ligands, antibodies, antibody fragments etc.

[0127] In one embodiment of any aspect herein, a functional protein with expression enhancing ability either by known or unknown mechanisms is used to enhance the level and duration of expression is co-expressed.

[0128] In one embodiment of any aspect herein, highly substituted saRNA is delivered to cells via electroporation.

[0129] In one embodiment of any aspect herein, highly substituted saRNA is delivered to cells via nucleofection.

[0130] In one embodiment of any aspect herein, the highly substituted saRNA is delivered to cells via lipid nanoparticles.

[0131] In one embodiment of any aspect herein, the highly substituted saRNA is delivered to a specified cell type by delivery with a lipid nanoparticle with a targeting moiety.

[0132] In a preferred embodiment of any aspect herein, the function of the chimeric antigen receptor is to activate immune cells.

[0133] In a preferred embodiment of any aspect herein, the function of the chimeric antigen receptor is to inhibit immune cells.

[0134] In one embodiment of any aspect herein, a reporter protein is co-expressed along with cargo protein to measure the levels of expression resulting from the highly substituted self-replicating RNA.

[0135] In one embodiment of any aspect herein, multiple cell types are modified with highly substituted self-replicating RNA.

[0136] In one embodiment of any aspect herein, cell type specific expression is achieved by selection of the proper modified nucleotide for high substitution.

### BRIEF DESCRIPTION OF THE DRAWINGS

[0137] FIG. 1A-1B shows a series of schematics. FIG. 1A shows conventional vs. self-replicating RNA modification of cells. In this figure, immune cells are used as a non-limiting example. The self-replicating RNA results in greater and longer expression of cargo protein(s) due to self-renewal and amplification. Conventional mRNA is subject to degradation and dilution via proliferation. FIG. 1B shows a schematic detailing the use of self-replicating RNA in modifying a cell by expressing protein(s). The delivered protein(s) (e.g., reporter, enzyme, receptor, ligand, transcription factor) can respond to external inputs (e.g., small molecules, light) or perform logic computation to enable control over the modified cell.

[0138] FIG. 2 shows a schematic detailing an exemplary format of self-replicating RNA. The developed self-replicating RNA formats include conserved sequence elements (CSE) derived from RNA viruses (e.g., Venezuela Equine Encephalitis virus) and coding sequences for non-structural proteins (e.g., nsp1, nsp2, nsp3, nsp4). The cargo coding sequence is placed downstream of a subgenomic promoter (SGP) or an internal ribosome entry site (IRES) sequence. Multiple cargo proteins can be co-expressed by separating the coding sequences with IRES or 2A sequences or additional SGP sequences.

[0139] FIG. 3 shows the expression of conventional chimeric antigen receptors via self-replicating RNA. Self-replicating RNA can be used to express a chimeric antigen receptor targeting a variety of antigens.

[0140] FIG. 4 shows a longer duration of expression of a HER2 chimeric antigen receptor from self-replicating RNA (black) compared to convention mRNA (gray). Cells expressing a HER2 CAR tagged with mCherry were analyzed via flow cytometry 48 and 96 hours after transfection. The percentage of cells expressing the receptor was determined by measuring mCherry fluorescence. The bars above the bar chart show the fold change between each time point for the respective conditions.

[0141] FIG. 5 shows a longer duration of expression of a CD19 chimeric antigen receptor from self-replicating RNA. Cells expressing a CD19 CAR were analyzed via flow cytometry for up to 12 days following transfection. The percentage of cells expressing the receptor was determined by staining the cells with an anti-myc antibody that binds a myc tag on the receptor. Lentivirally transduced cells were used as a control to account for any discrepancies with staining.

[0142] FIG. 6 shows detection of a CD19 chimeric antigen for a longer duration in CD3+ primary T cells transfected with self-replicating RNA. Primary CD3+ T cells were transfected with self-replicating (left) or conventional (right) RNA encoding a CD19 chimeric antigen receptor tagged with intracellular mCherry. The plots show the measurement of mCherry fluorescence (x axis) and an anti-myc stain (y axis) (an anti-myc antibody that binds an extracellular myc tag on the receptor) at multiple time points after transfection.

[0143] FIG. 7 shows function of a HER2 chimeric antigen receptor for a longer duration after transfection with self-replicating RNA. Activation of Jurkat T cells expressing a HER2 CAR from conventional or self-replicating RNA 72 hours after transfection (top). Cells were cultured on plates with or without HER2 antigen. The activation is measured by the fluorescence of GFP from an NFAT GFP reporter system. Fold activation read out from the mean fluorescence intensity of GFP (bottom). ****=p<0.0001. ns=not significant. N=3 independent replicates.

[0144] FIG. 8 shows function of a CD19 chimeric antigen receptor for a longer duration after transfection with self-replicating RNA. The percentage of CAR-T cells that were activated during overnight co-culture with CD19 expressing Nalm6 cells was measured by flow cytometry. Activation was measured by the fluorescence of GFP in Jurkat T cells containing an NFAT-GFP reporter system. N=3 independent replicates. **=p<0.001, ****=p<0.0001

[0145] FIG. 9 shows function of a CD19 chimeric antigen receptor in primary CD3+ T cells transfected with self-replicating RNA. The bar graph shows the percentage of CAR-T cells positive for CD69, a marker of early T cell activation. Primary T cells transfected with conventional or self-replicating RNA encoding a CD19 CAR were co-cultured with CD19 expressing Nalm6 cells. N=3 independent replicates. ****=p<0.0001. ns=not significant.

[0146] FIG. 10 shows enhanced function of a CD19 chimeric antigen receptor in primary CD3+ T cells transfected with self-replicating RNA. The bar graph shows the fold change in mean fluorescence intensity of CAR-T stained with an antibody targeting CD69 after an overnight co-culture with Nalm6 cells. N=3 independent replicates. *=p<0.05.

[0147] FIG. 11 shows enhanced cytotoxic function of CAR-T cells generated from self-replicating RNA. Target cell killing observed after co-culture of CAR-T cells with Nalm6-Luc cells for a period of 24 hours. The CAR-T cells were primary CD3+ T cells transfected with mRNA or self-replicating RNA 48 hours prior to the assay. N=3 independent replicates.

[0148] FIG. 12 shows greater levels of expression of a chimeric antigen receptor per cell after transfection with self-replicating RNA. The expression levels of a chimeric antigen receptor were measured by flow cytometry. The bars report the normalized mean fluorescence intensity of a fluorescently labeled anti-myc antibody that binds a myc tag on the receptor. The intensity values are normalized to the intensity of the cells transduced with lentivirus encoding the CD19 CAR. The fold difference is shown above each bar.

[0149] FIG. 13 shows greater levels of expression of a chimeric antigen receptor (tagged with mCherry) per cell for an extended duration after transfection with self-replicating RNA. CAR expression levels over time via measurement of mCherry fluorescence by flow cytometry. The resulting mean fluorescence intensity values were normalized to the value of the obtained for the cells transduced with lentivirus at each time point.

[0150] FIG. 14 shows greater amounts of chimeric antigen receptor RNA transcript at multiple time points after transfection. The RNA levels of the CD19 CAR transcript were measured via RT-qPCR. The resulting transcript levels were normalized to the value obtained for the cells transduced with lentivirus. N=3 independent replicates.

[0151] FIG. 15 shows a schematic depicting the expression of exemplary chimeric antigen receptors with external control and logic functions via self-replicating RNA. The schematic shows the structure of chimeric antigen receptors with external control and logic functions. Some of the receptors have domains that are responsive to external molecules to turn function on or off (e.g., ON-CAR, OFF-CAR, ON/OFF CAR). Additionally, some receptors function as activating or inhibitory receptors, allowing for conditional activity depending on the presence or absence of target antigens (e.g., inhibitory CAR, SUPRA CAR).

[0152] FIG. 16 shows the function of a drug controlled “ON” chimeric antigen receptor (“ON-CAR”). After the CAR is expressed, the NS3 protease domain will cleave flanking cut sites, resulting in detachment of the signaling domains from the extracellular scFv. When an NS3 protease inhibitor (e.g., grazoprevir) is added, the self-cleavage is prevented, and the CAR is able to turn on in the presence of the target antigen.

[0153] FIG. 17 shows the function of a drug controlled “OFF” chimeric antigen receptor (“OFF-CAR”). After the two components are expressed, the NS3 binding peptide on component 1 will bind the catalytically dead NS3 domain of component 2. This results in CAR activation when the target antigen is bound. If a protease inhibitor (e.g., grazoprevir) is added, the binding peptide is displaced, and the CAR cannot be activated.

[0154] FIG. 18 shows the function of a chimeric antigen receptor with “OFF” and “ON” drug control (“ON/OFF-CAR”). After the CAR is expressed, the NS3 protease domain will cleave flanking cut sites, resulting in detachment of the signaling domains from the extracellular scFv. When an NS3 protease inhibitor (e.g., grazoprevir) is added, the self-cleavage is prevented, and the CAR is functional. If lenalidomide is also added, and E3 ligase is recruited to the IKZF3 domain, and the CAR is degraded.

[0155] FIG. 19 shows the efficient expression of chimeric antigen receptors with external control functions via self-replicating RNA. Expression level of controllable and conventional CD19 CARs (e.g., ON-CAR, ON/OFF CAR) by self-replicating RNA, conventional mRNA, and lentiviral transduced cells measured via staining with anti-myc antibody and measurement of the fluorescence intensity of a mCherry tag on the receptor.

[0156] FIG. 20 shows that the activity of a chimeric antigen receptor expressed via self-replicating RNA can be increased by administration of a small molecule. The percentage of activated Jurkat CAR-T cells expressing a CD19 CAR with an NS3 domain (ON-CAR) was measured by flow cytometry. The cells were transfected with self-replicating RNA encoding the receptor 24 hours before the assay. The CAR-T cells were co-cultured overnight with Nalm6 in the absence or presence of grazoprevir at 1 μM. A CD19 CAR without an NS3 domain expressed via self-replicating RNA was included as a control (right). N=3 independent replicates. Ns=not significant. **=p<0.01. ****=p<0.0001.

[0157] FIG. 21 shows that the activity of a chimeric antigen receptor expressed via self-replicating RNA can be increased or decreased by administration of two distinct small molecules. The degree of activation of Jurkat CAR-T cells expressing a CD19 CAR with NS3 and IKZF3 domains (ON/OFF-CAR) was measured by flow cytometry. The cells were transfected with self-replicating RNA encoding the receptor 24 hours before the assay. The CAR-T cells were co-cultured overnight with Nalm6 without grazoprevir or lenalidomide, with grazoprevir at 1 μM, and 1 μM of grazoprevir with 1 μM of lenalidomide. N=3 independent replicates.

[0158] FIG. 22 shows that the activity of a chimeric antigen receptor expressed via self-replicating RNA can be controlled in primary T cells by administration of a small molecule (ON-CAR). The cytotoxicity of CAR-T cells expressing a CD19 CAR with an NS3 domain was measured by co-culture with a Nalm6 luciferase cell line at a 2:1 effector to target ratio. The CAR-T and Nalm6 cells were cultured overnight in the absence or presence of 1 μM GZV. As a control, CD19 CAR-T cells generated with self-replicating RNA were included along with CD19 CAR-T cells generated via lentivirally transduction.

[0159] FIG. 23 shows a schematic detailing the function of chimeric antigen receptors with activating or inhibitory functions that can be expressed via self-replicating RNA. An activating receptor binds an antigen on the target cell, resulting in killing of the target cell by the CAR-T cell. An inhibitory receptor binds an antigen expressed on an off-target cell, resulting in inhibition of the killing response. This serves to enhance the specificity of CAR-T therapy by improving the ability of the CAR-T cells to discriminate between target and non-target cells.

[0160] FIG. 24 shows that multiple chimeric antigen receptors with differing functions can be efficiently expressed in the same cell via self-replicating RNA. The flowcharts show expression of a CD19 activating CAR and HER2 inhibitory CAR in Jurkat cells transfected with self-replicating RNA. The CD19 activating CAR expression was measured by staining with an anti-myc antibody. The HER2 inhibitory CAR expression was measured by staining with an anti-V5 antibody. As a control, cells were transduced with a lentivirus encoding an activating CAR targeting CD19.

[0161] FIG. 25 shows that the expression of multiple chimeric antigen receptors via self-replicating RNA results in the ability to control cell function by logic computation. The activation of Jurkat CAR-T cells expressing a CD19 activating CAR and a HER2 inhibitory CAR via self-replicating RNA was measured by flow cytometry. The CAR-T cells were cultured on plates coated with CD19 antigen alone or CD19 and HER2 antigen together. The degree of NFAT activation was measured via mean fluorescence intensity after gating on CAR+ cells. As controls, cells were transduced with lentivirus or transfected with self-replicating RNA that encode a CD19 activating CAR only. N=3 independent replicates. Ns=not significant. ****=p<0.0001.

[0162] FIG. 26 shows a schematic detailing the split, universal, and programmable (SUPRA) CAR system that can be expressed via self-replicating RNA. The signaling and antigen recognition domains are split into two polypeptide sequences that can interact via a leucine zipper pair. The split nature of the SUPRA CAR system allows for tunable signaling by swapping the signaling domains recognized by a specific recognition domain. Additionally, the SUPRA CAR system can be used to perform logic computation by recognizing multiple antigens and conducting different signaling operations for each.

[0163] FIG. 27 shows reduced basal activation of T cells expressing a CAR with an a drug-controllable domain via self-replicating RNA (e.g., ON-CAR, ON/OFF-CAR). The bar graphs show the percentage of activated Jurkat CAR-T cells under resting conditions due to tonic signaling. Activation was measured by flow cytometry in Jurkat cells with an NFAT-GFP reporter. N=3 independent replicates. Ns=not significant. ****=p<0.0001.

[0164] FIG. 28 shows that the activation of T cells expressing a CAR with a drug-controllable domain (e.g., ON-CAR) via self-replicating RNA is comparable to the activation of T cells generated via lentivirus. Degree of NFAT activation was measured in Jurkat CAR-T cells after co-culture with CD19 expressing Nalm6 cells. The fold NFAT activation was determined by measuring the mean fluorescence intensity after gating on CAR+ cells. N=3 independent replicates. ****=p<0.0001.

[0165] FIG. 29 shows that the expression of a chimeric antigen receptor via self-replicating RNA is enhanced by co-expression of expression enhancing proteins. Jurkat T cells were transfected with self-replicating RNA encoding a CD19 CAR or CD19 CAR and B18R or E3L. The percentage of cells expressing the CAR was tracked longitudinally with flow cytometry by measuring the fluorescence of an mCherry tag on the C-terminus of the CAR.

[0166] FIG. 30 shows that the expression level over time of a chimeric antigen receptor expressed via self-replicating RNA can be controlled by co-expression of expression enhancing proteins. Jurkat T cells were transfected with self-replicating RNA encoding a CD19 CAR or CD19 CAR and either B18R or E3L. The expression levels of the CAR were tracked longitudinally with flow cytometry by measuring the fluorescence of an mCherry tag on the C-terminus of the CAR. The MFI values were normalized to the MFI for the self-replicating CD19 CAR alone on day 1.

[0167] FIG. 31 shows Jurkat T cells with an NFAT-GFP reporter that were transfected with self-replicating RNA encoding a CD19 CAR or CD19 CAR and either B18R or E3L. The activation of the NFAT pathway was measured by analysis of GFP expression in cells that were expressing the constructs.

[0168] FIG. 32 shows that the co-expression of additional proteins does not impact the activity of the chimeric antigen receptor expressed via self-replicating RNA. Degree of NFAT activation was measured in Jurkat CAR-T cells after co-culture with CD19 expressing Nalm6 cells. The fold NFAT activation was determined by measuring the mean fluorescence intensity after gating on CAR+ cells. N=3 independent replicates.

[0169] FIG. 33 shows that T cells can be transfected with mRNA containing lipid nanoparticles with or without antibody conjugation on the nanoparticle surface. The bar graphs show luminescence following transfection of luciferase encoding mRNA in Jurkat via Dlin-MC3-PEG-DBCO naked (“LNP”), isotype antibody conjugated (“α-Iso LNP”), or anti-CD3 antibody conjugated (“α-CD3 LNP”) lipid nanoparticles. As a positive transfection control, electroporation was performed. Transfection was verified by lysing the cells with a commercial luciferase assay reagent and measuring the emitted light with a plate reader. n=3 independent replicates.

[0170] FIG. 34 shows that self-replicating RNA can be used to express a protein and track its activity over an extended duration. The flow plots show expression of mCherry from self-replicating RNA as a model cargo over a period of 10 days in Jurkat T cells.

[0171] FIG. 35 shows that primary cells can be modified ex vivo to express a protein via self-replicating RNA. The flow plots show expression of mCherry from self-replicating RNA as a model cargo over a period of 7 days in Primary CD3+ T cells.

[0172] FIG. 36 is a schematic detailing exemplary self-amplifying RNAs (saRNAs) comprising modified nucleotides. A linearized plasmid encoding an RNA Dependent RNA Polymerase (RdRp) as well as a cargo of interest is shown utilized as template for in vitro transcription (IVT). The IVT reaction includes a nucleoside triphosphate (NTP) mixture of 25%-100% modified nucleotides, and can include cap analog for co-transcriptional capping. The resulting composition is an saRNA with 25%-100% substitution of modified nucleotide.

[0173] FIG. 37 is a schematic detailing the expression profile of saRNA with >25% substitution of the specified modified nucleotide. The top of the schematic details the result of unmodified saRNA, where a small population of cells uptake the saRNA and express the cargo. Aspects of this disclosure detail the unexpected result that the incorporation of modified nucleotides into the self-amplifying RNA increased both the percentage of transfected cells and the amount of protein expressed in each transfected cell.

[0174] FIG. 38 depicts the transfection efficiency of a library of self-amplifying RNA encoding for mCherry with individual, full substitution by 28 modified nucleotides in HEK293T cells. This IVT was performed using a template with a T7 promoter using m7G(5′)ppp(5′)(2′OMeA)pU (CLEANCAP AU) as the 5′ Cap.

[0175] FIG. 39 depicts the median expression intensity of a library of self-amplifying RNA encoding for mCherry with individual, full substitution by 28 modified nucleotides in HEK293T cells. This IVT was performed using a template with a T7 promoter using m7G(5′)ppp(5′)(2′OMeA)pU (CLEANCAP AU) as the 5′ Cap.

[0176] FIG. 40 depicts the transfection efficiency of a library of self-amplifying RNA encoding for mCherry with individual, full substitution by 28 modified nucleotides in HEK293T cells. This IVT was performed using a template with a T7 promoter using 3′-O-Me-m7G(5′)ppp(5′)G (ARCA) as the 5′ Cap.

[0177] FIG. 41 depicts the median expression intensity of a library of self-amplifying RNA encoding for mCherry with individual, full substitution by 28 modified nucleotides in HEK293T cells. This IVT was performed using a template with a T7 promoter using 3′-O-Me-m7G(5′)ppp(5′)G (ARCA) as the 5′ Cap.

[0178] FIG. 42 depicts relative expression of a cargo protein, as measured by MFI of mCherry, from self-amplifying RNA with differing initiation nucleotides. This figure shows the Cap 0 structure in HEK293T cells. Left-right order of the bars in each group corresponds to top-down order in the legend.

[0179] FIG. 43 depicts relative expression of a cargo protein, as measured by MFI of mCherry, from self-amplifying RNA with differing initiation nucleotides. This figure shows the Cap 1 structure in HEK293T cells. Left-right order of the bars in each group corresponds to top-down order in the legend.

[0180] FIG. 44 depicts relative expression of a cargo protein, as measured by percent positive mCherry expression, from self-amplifying RNA with differing initiation nucleotides. This figure shows the Cap 0 structure in HEK293T cells. Left-right order of the bars in each group corresponds to top-down order in the legend.

[0181] FIG. 45 depicts relative expression of a cargo protein, as measured by percent positive mCherry expression, from self-amplifying RNA with differing initiation nucleotides. This figure shows the Cap 1 structure in HEK293T cells. Left-right order of the bars in each group corresponds to top-down order in the legend.

[0182] FIG. 46A-46B depict the protein level early interferon α and β response in human peripheral blood mononuclear cells (PBMCs) using Cap-1 and ATP-initiated constructs. PBMCs were exposed to RNA, either saRNA or traditional highly substituted mRNA, for 6 hours, and IFNα (all subtypes; see e.g., FIG. 46A) and IFNβ (see e.g., FIG. 46B) concentration was analyzed via ELISA. Cell culture supernatant was diluted 1:1 in reagent buffer. Left-right order of the bars corresponds to top-down order in the legend.

[0183] FIG. 47A-47B depict the transcriptional early interferon α and β response in human peripheral blood mononuclear cells using Cap-1 and ATP-initiated constructs. PBMCs were exposed to saRNA with wild-type nucleotides or with modified nucleotides, for 6 hours, and mRNA expression levels of IFNA1 (see e.g., FIG. 47A) and IFNB1 (see e.g., FIG. 47B) were measured via qPCR. Data represents transcriptional levels from three unique human donors dosed at 100 ng/1×10⁵ cells. Left-right order of the bars corresponds to top-down order in the legend.

[0184] FIG. 48 depicts spike protein (Wuhan-1 variant) expression, as measured by MFI from a AF647 conjugated anti-spike antibody, from self-amplifying RNA in C2C12 mouse myoblast cells. The different modified nucleotides which are highly substituted are shown on the right of the figure. Left-right order of the bars corresponds to top-down order in the legend. Cap-1 and ATP-initiated saRNA constructs were used.

[0185] FIG. 49 depicts spike protein (Wuhan-1 variant) expression, as measured by percent positively expressing cells, from self-amplifying RNA in C2C12 mouse myoblast cells. The different modified nucleotides which are highly substituted are shown on the right of the figure. Left-right order of the bars corresponds to top-down order in the legend. Cap-1 and ATP-initiated saRNA constructs were used.

[0186] FIG. 50 depicts the cell type specific expression of a vaccine antigen from highly substituted self-amplifying RNA. This IVT was performed using a template with a T7 promoter using m7G(5′)ppp(5′)(2′OMeA)pU (CLEANCAP AU) as the 5′ Cap. Left-right order of the bars in each group corresponds to top-down order in the legend.

[0187] FIG. 51A-51C depicts the expression potentiation conferred by 100% substitution with 5-methylcytidine using Cap-1 and ATP-initiated saRNA constructs in human CD3+ T cells. Untreated cells are compared to saRNA encoding a fluorescent reporter protein, mCherry, with or without nucleotide modification. FIG. 51A shows representative flow cytometry plots of each treatment condition. FIG. 51B shows representative live-cell fluorescent microscopy images. FIG. 51C shows quantification of flow cytometry data from biological replicate experiments; left-right order of the bars corresponds to top-down order in the legend.

[0188] FIG. 52 depicts the prolonged and robust expression conferred by 100% substitution with 5-methylcytidine using Cap-1 and ATP-initiated saRNA constructs in human CD3+ T cells. Untreated cells are compared to saRNA encoding a fluorescent reporter protein, mCherry, with or without nucleotide modification and analyzed over time by flow cytometry.

[0189] FIG. 53A-53C depicts the expression potentiation conferred by 100% substitution with 5-methylcytidine using Cap-1 and ATP-initiated saRNA constructs in Jurkat cells. Untreated cells are compared to saRNA encoding a fluorescent reporter protein, mCherry, with or without nucleotide modification. FIG. 53A shows representative flow cytometry plots of each treatment condition. FIG. 53B shows representative live-cell fluorescent microscopy images. FIG. 53C shows quantification of flow cytometry data from biological replicate experiments; left-right order of the bars corresponds to top-down order in the legend.

[0190] FIG. 54A-54B depicts the prolonged, robust expression conferred by 100% substitution with 5-methylcytidine using Cap-1 and ATP-initiated saRNA constructs in Jurkat cells. Untreated cells are compared to saRNA encoding a fluorescent reporter protein, mCherry, with or without nucleotide modification and analyzed over time by flow cytometry. FIG. 54A shows histograms from these experiments, and FIG. 54B shows time-course line graphs of these experiments.

[0191] FIG. 55 depicts the impact of increasing substitution ratios of N1-methylpseudouridine and 5-methylcytidine on Cap-1 and ATP-initiated saRNA efficacy in Jurkat cells. Transfection efficiency of saRNA encoding a fluorescent reporter protein synthesized with increasing % substitution of modified nucleotides. 0% substitution refers to unmodified saRNA.

[0192] FIG. 56 depicts the impact of increasing substitution ratios of 5-methylcytidine on Cap-1 and ATP-initiated saRNA immunogenicity. Human PBMCs treated for 6 hours with saRNA loaded LNPs and then harvested for gene expression analysis. 0% substitution refers to unmodified saRNA. Left-right order of the bars corresponds to top-down order in the legend.

[0193] FIG. 57 depicts the increased expression of a chimeric antigen receptor conferred by 100% substitution with 5-methylcytidine of Cap-1 and ATP-initiated saRNA constructs in human CD3+ T cells. saRNA encoding a chimeric antigen receptor was delivered to CD3+ T cells via lipid nanoparticle synthesized with two different helper lipids with or without a CD3 targeting domain.

[0194] FIG. 58A-58I are a series of schematics and graphs showing the identification of modified nucleotides compatible with self-amplifying RNA and their in vitro bioactivity. FIG. 58A shows a schematic illustrating the limitations of unmodified saRNA, N1mΨ modified saRNA, and the advantages of saRNA with compatible modNTPs. FIG. 58B shows a workflow for synthesizing a library of saRNA with complete substitution of modified nucleotides and transfecting the library encoding an mCherry reporter into HEK293 cells using lipofection. FIG. 58C shows flow cytometry results measuring the percentage of expressing cells in HEK293 cells transfected with the library of modified saRNA. Error bars represent the standard deviation of n=3 biological replicates. FIG. 58D shows live-cell fluorescent microscopy images of selected modified nucleotides and representative histograms in HEK293 cells. Error bars represent the standard deviation of n=4 biological replicates. FIG. 58E shows expression levels 24 hours after transfection of 10 ng of RNA encoding a luciferase reporter in HEK293 cells with SM102 LNPs. Luciferase signal is presented as fold-change compared to untransfected mock cells. Error bars represent the standard deviation of n=4 biological replicates. FIG. 58F shows expression levels 24 hours after transfection of 10 ng of RNA encoding a luciferase reporter in C2C12 cells with SM102 LNPs. Luciferase signal is presented as fold-change compared to untransfected mock cells. Error bars represent the standard deviation of n=4 biological replicates. FIG. 58G shows transfection efficiency 24 hours after transfection with 25 ng and 250 ng of RNA encoding an mCherry reporter in Jurkat cells with SM102 LNPs. Error bars represent the standard deviation of n=3 biological replicates. FIG. 58H shows transfection efficiency 24 hours after transfection of 500 ng of RNA encoding an mCherry reporter in CD3+ T cells from two different donors. n=3 biological replicates per group. FIG. 58I shows an expression time course in Jurkat cells using 100 ng of unmodified or 5mC modified saRNA. Error bars represent the standard deviation of n=3 biological replicates. Statistical significance was determined by two-way ANOVA with Tukey's multiple comparisons correction, ****p<0.0001, **p<0.01, *p<0.05. Left-right order of the bars in each group corresponds to top-down order in the legend in FIG. 58E-58H.

[0195] FIG. 59A-59G are a series of schematics and graphs showing the evaluation of immunogenicity of modified saRNA in human PBMCs. FIG. 59A shows a diagram depicting modified saRNA evading TLR detection, leading to reduced interferon production. FIG. 59B shows an assay for detection of early interferon response from transfection of human PBMCs with unmodified or modified saRNA. FIG. 59C-59E show gene expression analysis of IFN-α1 (FIG. 59C), IFN-α2, (FIG. 59D) and IFN-β1 (FIG. 59E) in RNA harvested from unique human PBMCs (n=3) after 6-hour treatment with saRNA. FIG. 59F shows an IFN-α (all-subtype) serum analysis after 6 hours of saRNA treatment in a unique donor. FIG. 59G shows a 6 hour and 24-hour serum analysis of IFN-β levels from saRNA treated PBMCs. Error bars represent standard deviation of n=3 biological replicates. Statistical significance was determined by ANOVA, controlling for multiple comparisons using Dunnett's method. ***p<0.001, ****p<0.0001. n.d. not determined/below limit of detection. Left-right order of the bars in each group corresponds to top-down order in the legend in FIG. 59C-59G.

[0196] FIG. 60A-60H are a series of schematics and graphs showing the development and characterization of a fully modified saRNA vaccine against SARS-CoV-2. FIG. 60A shows a schematic illustrating the different RNA formats for expressing the SARS-CoV-2 Spike protein, compared in vitro and in vivo. This includes non-replicating N1mΨmRNA, wildtype self-amplifying RNA, and 5mC modified self-amplifying RNA. FIG. 60B shows expression of Spike protein 24 hours after transfection with 100 ng of RNA in SM102 LNPs in HEK293 cells. FIG. 60C shows expression of Spike protein 24 hours after transfection with 100 ng of RNA in SM102 LNPs in C2C12 cells. FIG. 60D shows median fluorescence intensity (MFI) of anti-Spike AF647 staining in C2C12 cells. MFI is relative to untreated cells. Error bars represent the standard deviation of n=3 biological replicates. FIG. 60E shows a study design for the SARS-CoV-2 challenge study in C57BL/6 mice. Mice were vaccinated in a prime-boost scheme, serum was collected to analyze interferon response and titers, and mice were challenged with SARS-CoV-2 MA30 on day 35. FIG. 60F shows IFN-α1 expression in serum collected 24 hours or 48 hours after initial vaccination with 1000 ng of RNA in LNPs. Error bars represent the standard deviation of n=5 biological replicates. FIG. 60G shows survival of mice after challenge with a lethal challenge of MA30 virus. n=10 mice per group. FIG. 60H shows weight change of mice after challenge with mouse-adapted SARS-CoV-2 MA30 virus. Error bars indicate SEM. Statistical significance was determined by ANOVA, controlling for multiple comparison's using Dunnett's method. **p<0.005, ***p<0.001, ****p<0.0001. For survival study statistics, a log-rank (Matel-Cox) test was used between groups. ****=p<0.0001, ***=p<0.001. Left-right order of the bars in each group corresponds to top-down order in the legend in FIGS. 60D and 60F.

[0197] FIG. 61A-61D are a series of graphs, plots, and images showing testing of modified saRNAs. FIG. 61A shows a comparison of flow cytometry results from modified saRNA screen to a wildtype unmodified control construct. FIG. 61B shows median fluorescence intensity of HEK293 cells transfected with library of modified saRNA. FIG. 61C shows live-cell microscopy images of control samples from FIG. 58D. Wildtype refers to unmodified saRNA. FIG. 61D shows representative histograms of HEK293 cells transfected with modified saRNA synthesized with 3′-O-Me-m7G(5′)ppp(5′)G (ARCA) (top row) or m7G(5′)ppp(5′)(2′OMeA)pU (CLEANCAP AU) (bottom row).

[0198] FIG. 62A-62E are a series of graphs and images showing testing of modified saRNAs. FIG. 62A shows a dose response of HEK293 transfected with SM102 LNPs containing N1mΨmRNA, WT saRNA, or 5mC saRNA encoding luciferase. FIG. 62B shows representative flow plots of Jurkat cells transfected with WT or 5mC saRNA encoding mCherry. FIG. 62C shows live-cell microscopy of Jurkat cells transfected with WT or 5mC saRNA encoding mCherry. FIG. 62D shows expression levels 24 hours after transfection of 250 ng of RNA encoding a luciferase reporter in Jurkat cells with SM102 LNPs. Luciferase signal is presented as fold-change compared to untransfected mock cells. Left-right order of the bars corresponds to top-down order in the legend. FIG. 62E shows MFI of Jurkat cells transfected with WT or 5mC saRNA encoding mCherry over 7 days.

[0199] FIG. 63A-63B are a series of plots and images showing testing of modified saRNAs. FIG. 63A shows representative flow plots of primary T cells from two different donors transfected with WT or 5mC saRNA encoding mCherry. FIG. 63B shows live cell microscopy of primary T cells transfected with WT or 5mC encoding mCherry.

[0200] FIG. 64A-64D are a series of graphs showing testing of modified saRNAs as a SARS-CoV-2 vaccine. FIG. 64A shows transfection efficiency 24 hours after transfection of C2C12 with 100 ng of modified Spike encoding mRNA or saRNA. FIG. 64B shows detection of Spike protein by ELISA in lysed C2C12 cells after transfection with 100 ng modified Spike encoding mRNA or saRNA. FIG. 64C shows transfection efficiency 24 hours after transfection of C2C12 with 25 ng of modified HA encoding mRNA or saRNA. FIG. 64D shows median fluorescence intensity (MFI) of anti-HA AF647 staining in C2C12 cells. Left-right order of the bars in each group corresponds to top-down order in the legend in FIG. 64A-64D.

[0201] FIG. 65A-65B are a series of graphs and plots showing testing of modified saRNAs as a SARS-CoV-2 vaccine. FIG. 65A shows IFN-β expression in serum collected 24 hours or 48 hours after initial vaccination with 1000 ng of RNA in LNPs. Error bars represent the standard deviation of n=5 biological replicates. Left-right order of the bars in each group corresponds to top-down order in the legend. FIG. 65B shows survival of mice after challenge with a lethal challenge of MA30 virus. n=10 mice per group. For survival study statistics, a log-rank (Matel-Cox) test was used between groups. *=p<0.0001.

[0202] FIG. 66A-66D are a series of graphs showing testing of modified saRNAs as a SARS-CoV-2 vaccine. FIG. 66A shows encapsulation efficiency of post-dialysis spike encoding LNPs used in in vivo study. FIG. 66B shows the size of LNPs used in in vivo study. FIG. 66C shows polydispersity index (PDI) of LNPs used in in vivo study. FIG. 66D shows the RNA concentration in ng/uL. Left-right order of the bars in each group corresponds to top-down order in the legend in FIG. 66A-66D.

[0203] FIG. 67A-67D show flow cytometry gating strategies used in Example 20. FIG. 67A shows a gating strategy used in screening of modNTP saRNA library via HEK293 transfection. FIG. 67B shows a gating strategy used in analysis of transfection efficiency of saRNA LNPs in Jurkat T cells. FIG. 67C shows a gating strategy for determining the expression of SARS-CoV-2 Spike protein in HEK or C2C12 cells. FIG. 67D shows a gating strategy used in analysis of transfection efficiency of saRNA LNPs in primary T cells.

[0204] FIG. 68. shows yield of self-amplifying RNA constructs after in vitro transcription without modified nucleotides (wildtype) or 100% substitution of cytidine or uridine with 5-hydroxymethylcytidine, 5-methylcytidine or 5-methlyuridine, N1-methylpseudouridine respectively. Reported yields are relative to wildtype for each construct. Left-right order of the bars in each group corresponds to top-down order in the legend.

[0205] FIG. 69 is a series of flow cytometry results showing the distribution of mCherry expression 24 hours after LNP mediated transfection of Jurkat cells.

[0206] FIG. 70 shows an analysis of firefly luciferase reporter expression in HEK293-T cells transfected with LNPs containing N1-methylpseudouridine mRNA, unmodified (wildtype) saRNA, or 5-methylcytidine modified saRNA.

[0207] FIG. 71 shows an analysis of IL12 p70 expression in HEK293-T cells transfected with LNPs containing unmodified (wildtype) saRNA, or 5-methylcytidine modified saRNA.

[0208] FIG. 72 shows target cell lysis of primary human T cells co-cultured with HER2 expressing Nalm6 cells and supernatant from C2C12 cells transfected with unmodified (WT) or 5-methylcytidine (5mC) modified saRNA encoding a HER2 bispecific T cell engager (BiTE).

[0209] FIG. 73 shows target cell lysis of primary human T cells co-cultured with HER2 expressing Nalm6 cells and supernatant from C2C12 cells transfected with unmodified (WT) or 5-methylcytidine (5mC) modified saRNA encoding a HER2 bispecific T cell engager (BiTE).

[0210] FIG. 74 shows target cell lysis of primary human T cells co-cultured with HER2 negative wildtype Nalm6 cells or HER2 expressing Nalm6 cells and supernatant from C2C12 cells transfected with unmodified (WT) or 5-methylcytidine (5mC) modified saRNA encoding a HER2 bispecific T cell engager (BiTE).

[0211] FIG. 75 is a series of flow cytometry results showing the distribution of the mCherry reporter expression 24 hours after LNP mediated transfection of C2C12 cells with an saRNA or mRNA encoding a HER2 bispecific antibody.

[0212] FIG. 76 shows the percentage of C2C12 cells transfected by LNPs containing the indicated RNA constructs. The percentage of cells expressing the encoded protein was determined by measurement of the mCherry reporter.

[0213] FIG. 77 shows relative expression of a bispecific T cell engager in C2C12 cells transfected by LNPs containing each RNA construct, as measured by median fluorescence intensity of an mCherry reporter.

[0214] FIG. 78 is a series of flow cytometry data illustrating GFP expression in Jurkat cells harboring an NFAT GFP reporter, which were co-cultured with Nalm6 cells overexpressing HER2 and supernatant derived from C2C12 cells transfected with BiTE encoding saRNA or mRNA constructs.

[0215] FIG. 79 shows representative bioluminescent images of mice at different time points after intramuscular injection with LNPs containing 2.5 μg of luciferase encoding N1mΨmRNA (left) or 5mC saRNA (right). Scale bar indicates radiance.

[0216] FIG. 80 shows total flux from BLI imaging of mice injected intramuscularly with LNPs containing 2.5 μg of luciferase encoding N1mΨmRNA or 5mC saRNA (n=5 biological replicates). Dashed line indicates average signal for the PBS group over the duration of the study. Error bars indicate standard error mean.

[0217] FIG. 81 is a schematic of the HER2 CAR saRNA plasmid.

[0218] FIG. 82 is a schematic of the CD19 CAR saRNA plasmid.

[0219] FIG. 83 is a schematic of the CD19 NS3 CAR saRNA plasmid.

[0220] FIG. 84 is a schematic of the CD19 NS3-IKZF3 CAR saRNA plasmid.

[0221] FIG. 85 is a schematic of the CD19 aCAR+HER2 iCAR saRNA plasmid.

[0222] FIG. 86 is a schematic of the mCherry saRNA plasmid.

[0223] FIG. 87 is a schematic of the SARS-CoV-2 Spike saRNA plasmid.

[0224] FIG. 88 is a schematic of the Influenza HA saRNA plasmid.

[0225] FIG. 89 is a schematic of the Firefly Luciferase saRNA plasmid.

[0226] FIG. 90 is a schematic of the HER2 CD3 scFv BITE saRNA plasmid.

[0227] FIG. 91 is a schematic of the IL12 saRNA plasmid.

[0228] FIG. 92 is a bar graph showing the detection of bioactive GLP-1 peptide (amino acids 7-37) in the supernatant of HEK293 cells transfected with 5-methylcytidine substituted self-amplifying RNA.

### DETAILED DESCRIPTION

[0229] The above summary of the present invention is not intended to describe each disclosed embodiment or every implementation of the present invention. The description and examples that follow exemplifies illustrative embodiments. In several places throughout the application, guidance is provided through lists of examples, which can be used in various combinations. In each instance, the recited list serves only as a representative group and should not be interpreted as an exclusive list.

[0230] Disclosed herein are methods and compositions for modifying and controlling the activity of cells by expression of proteins from self-replicating RNA. The technology disclosed herein allows for the ability to express proteins at levels comparable to other methods used to establish constitutive protein expression. The protein cargo can be any genetically encodable protein with known or unknown function. The system is modular and allows for the expression of multiple proteins with various functions. Additionally, the activity of the cells transfected with the self-replicating RNA can be controlled by expression of proteins responsive to external inputs or by expression of proteins that that interact with each other to conduct logic computation. The technology is useful for generating cell therapies with controllable activity in a rapid manner without gene editing. Additionally, the technology can be combined with RNA delivery strategies (e.g., lipid nanoparticles) to transfect cells in vivo.

[0231] As a clinically relevant, non-limiting example, this disclosure outlines the development of self-replicating RNA systems that are used to modify immune cells to express reporter proteins and chimeric antigen receptors targeting CD19 and HER2. In some embodiments, the activity of the modified cells is controlled externally or by logic computation circuits that are established by the delivered self-replicating RNA.

[0232] Disclosed herein are methods and compositions for modifying and controlling the activity of cells by expression of proteins from self-amplifying RNA that is highly substituted with chemically modified nucleotides. The technology disclosed herein allows for highly substituted saRNA to express proteins at levels comparable or greater than unsubstituted self-amplifying RNA. The protein cargo can be any genetically encodable protein with known or unknown function. The system is modular and allows for the expression of multiple proteins with various functions. Additionally, the activity of the cells transfected with the highly substituted self-amplifying RNA can be controlled by expression of proteins responsive to external inputs or by expression of proteins that interacts with each other to conduct logic computation. The technology is useful for generating low dose saRNA based vaccines that express equal or greater cargo compared to an unmodified saRNA. An additional aspect of the invention is the decreased immunogenicity through which highly substituted saRNA are potentiated. The technology is useful for generating vaccines, cell therapies either in situ or ex vivo, and protein replacement therapies. Additionally, the technology can be combined with RNA delivery strategies (e.g., lipid nanoparticles) to transfect cells in vivo.

### Self-Amplifying RNAs

[0233] Described herein in multiple aspects are self-amplifying RNAs. As used herein, the terms “self-amplifying RNA” or “saRNA” or “self-replicating RNA” or “srRNA” are used interchangeably and refer to an RNA strand capable of undergoing replication activity that results in replicate strands from an original strand.

[0234] In multiple aspects described herein is an saRNA comprising: (a) at least one non-structural protein derived from at least one virus; (b) a subgenomic promoter (SGP) derived from at least one virus; and (c) least one cargo of interest. In additional aspects described herein is an saRNA comprising from 5′ to 3′: (a) at least one non-structural protein derived from at least one virus; (b) a subgenomic promoter (SGP) derived from at least one virus; and (c) least one cargo of interest.

[0235] In other aspects described herein is an saRNA comprising: (a) at least one non-structural protein derived from at least one alphavirus; (b) a subgenomic promoter (SGP) derived from at least one alphavirus; and (c) least one cargo of interest. In additional aspects described herein is an saRNA comprising from 5′ to 3′: (a) at least one non-structural protein derived from at least one alphavirus; (b) a subgenomic promoter (SGP) derived from at least one alphavirus; and (c) least one cargo of interest.

[0236] In one aspect described herein is an saRNA comprising: (a) a 5′ cap; (b) non-structural protein 1 (nsp1), non-structural protein 2 (nsp2), non-structural protein 3 (nsp3), and/or non-structural protein 4 (nsp4), each derived from at least one virus; (c) a subgenomic promoter (SGP) derived from at least one virus; (d) 5′ untranslated region (UTR) derived from at least one virus; (e) the at least one cargo of interest; (f) a 3′ untranslated region (UTR) derived from at least one virus; and (g) a poly-A tail.

[0237] In one aspect described herein is an saRNA comprising from 5′ to 3′: (a) a 5′ cap; (b) non-structural protein 1 (nsp1), non-structural protein 2 (nsp2), non-structural protein 3 (nsp3), and/or non-structural protein 4 (nsp4), each derived from at least one virus; (c) a subgenomic promoter (SGP) derived from at least one virus; (d) 5′ untranslated region (UTR) derived from at least one virus; (e) the at least one cargo of interest; (f) a 3′ untranslated region (UTR) derived from at least one virus; and (g) a poly-A tail.

[0238] In one aspect described herein is an saRNA comprising: (a) a 5′ cap; (b) non-structural protein 1 (nsp1), non-structural protein 2 (nsp2), non-structural protein 3 (nsp3), and/or non-structural protein 4 (nsp4), each derived from at least one alphavirus; (c) a subgenomic promoter (SGP) derived from at least one alphavirus; (d) 5′ untranslated region (UTR) derived from at least one alphavirus; (e) the at least one cargo of interest; (f) a 3′ untranslated region (UTR) derived from at least one alphavirus; and (g) a poly-A tail.

[0239] In one aspect described herein is an saRNA comprising from 5′ to 3′: (a) a 5′ cap; (b) non-structural protein 1 (nsp1), non-structural protein 2 (nsp2), non-structural protein 3 (nsp3), and/or non-structural protein 4 (nsp4), each derived from at least one alphavirus; (c) a subgenomic promoter (SGP) derived from at least one alphavirus; (d) 5′ untranslated region (UTR) derived from at least one alphavirus; (e) the at least one cargo of interest; (f) a 3′ untranslated region (UTR) derived from at least one alphavirus; and (g) a poly-A tail.

[0240] In one aspect described herein is an saRNA comprising: (a) a 5′ cap; (b) non-structural protein 1 (nsp1), non-structural protein 2 (nsp2), non-structural protein 3 (nsp3), and/or non-structural protein 4 (nsp4), each derived from at least one virus, wherein the nsP1 comprises at least one conserved 5′ sequence element (5′ CSE); (c) a subgenomic promoter (SGP) derived from at least one virus; (d) 5′ untranslated region (UTR) derived from at least one virus; (e) the at least one cargo of interest; (f) a 3′ untranslated region (UTR) derived from at least one virus, wherein the 3′ UTR comprises at least one 3′-conserved sequence element (3′ CSE); and (g) a poly-A tail.

[0241] In one aspect described herein is an saRNA comprising from 5′ to 3′: (a) a 5′ cap; (b) non-structural protein 1 (nsp1), non-structural protein 2 (nsp2), non-structural protein 3 (nsp3), and/or non-structural protein 4 (nsp4), each derived from at least one virus, wherein the nsP1 comprises at least one conserved 5′ sequence element (5′ CSE); (c) a subgenomic promoter (SGP) derived from at least one virus; (d) 5′ untranslated region (UTR) derived from at least one virus; (e) the at least one cargo of interest; (f) a 3′ untranslated region (UTR) derived from at least one virus, wherein the 3′ UTR comprises at least one 3′-conserved sequence element (3′ CSE); and (g) a poly-A tail.

[0242] In one aspect described herein is an saRNA comprising: (a) a 5′ cap; (b) non-structural protein 1 (nsp1), non-structural protein 2 (nsp2), non-structural protein 3 (nsp3), and/or non-structural protein 4 (nsp4), each derived from at least one alphavirus, wherein the nsP1 comprises at least one conserved 5′ sequence element (5′ CSE); (c) a subgenomic promoter (SGP) derived from at least one alphavirus; (d) 5′ untranslated region (UTR) derived from at least one alphavirus; (e) the at least one cargo of interest; (f) a 3′ untranslated region (UTR) derived from at least one alphavirus, wherein the 3′ UTR comprises at least one 3′-conserved sequence element (3′ CSE); and (g) a poly-A tail.

[0243] In one aspect described herein is an saRNA comprising from 5′ to 3′: (a) a 5′ cap; (b) non-structural protein 1 (nsp1), non-structural protein 2 (nsp2), non-structural protein 3 (nsp3), and/or non-structural protein 4 (nsp4), each derived from at least one alphavirus, wherein the nsP1 comprises at least one conserved 5′ sequence element (5′ CSE); (c) a subgenomic promoter (SGP) derived from at least one alphavirus; (d) 5′ untranslated region (UTR) derived from at least one alphavirus; (e) the at least one cargo of interest; (f) a 3′ untranslated region (UTR) derived from at least one alphavirus, wherein the 3′ UTR comprises at least one 3′-conserved sequence element (3′ CSE); and (g) a poly-A tail.

[0244] In some embodiments of the aspects, an saRNA as described herein comprises at least one nucleotide modification, as described further herein. In some embodiments of the aspects, an saRNA as described herein does not comprises nucleotide modifications.

[0245] In one aspect, described herein is a self-amplifying RNA (saRNA) comprising: (a) at least one non-structural protein derived from at least one virus; (b) a subgenomic promoter (SGP) derived from at least one virus; and (c) at least one cargo of interest; wherein the saRNA comprises at least 25% modified nucleotides, wherein the modified nucleotides are selected from the group consisting of 5-methylcytidine, 5-methyluridine, 5-hydroxymethyluridine, and 5-hydroxymethylcytidine; wherein the initiating nucleotide comprises an adenosine or adenosine analog; and wherein the initiating nucleotide of the saRNA is methylated at the 2′O position of the ribose (Cap1).

[0246] In one aspect, described herein is a self-amplifying RNA (saRNA) comprising: (a) a 5′ cap; (b) non-structural protein 1 (nsp1), non-structural protein 2 (nsp2), non-structural protein 3 (nsp3), and/or non-structural protein 4 (nsp4), each derived from at least one virus; (c) a subgenomic promoter (SGP) derived from at least one virus; (d) a 5′ untranslated region (UTR) derived from at least one virus; (e) at least one cargo of interest; (f) a 3′ untranslated region (UTR) derived from at least one virus; and (g) a poly-A tail; wherein the saRNA comprises at least 25% modified nucleotides, wherein the modified nucleotides are selected from the group consisting of 5-methylcytidine, 5-methyluridine, 5-hydroxymethyluridine, and 5-hydroxymethylcytidine; wherein the initiating nucleotide comprises an adenosine or adenosine analog; and wherein the initiating nucleotide of the saRNA is methylated at the 2′O position of the ribose (Cap1).

[0247] In one aspect, described herein is a self-amplifying RNA (saRNA) comprising from 5′ to 3′: (a) at least one non-structural protein derived from at least one virus; (b) a subgenomic promoter (SGP) derived from at least one virus; and (c) at least one cargo of interest; wherein the saRNA comprises at least 25% modified nucleotides, wherein the modified nucleotides are selected from the group consisting of 5-methylcytidine, 5-methyluridine, 5-hydroxymethyluridine, and 5-hydroxymethylcytidine; wherein the initiating nucleotide comprises an adenosine or adenosine analog; and wherein the initiating nucleotide of the saRNA is methylated at the 2′O position of the ribose (Cap1).

[0248] In one aspect, described herein is a self-amplifying RNA (saRNA) comprising from 5′ to 3′: (a) a 5′ cap; (b) non-structural protein 1 (nsp1), non-structural protein 2 (nsp2), non-structural protein 3 (nsp3), and/or non-structural protein 4 (nsp4), each derived from at least one virus; (c) a subgenomic promoter (SGP) derived from at least one virus; (d) a 5′ untranslated region (UTR) derived from at least one virus; (e) at least one cargo of interest; (f) a 3′ untranslated region (UTR) derived from at least one virus; and (g) a poly-A tail; wherein the saRNA comprises at least 25% modified nucleotides, wherein the modified nucleotides are selected from the group consisting of 5-methylcytidine, 5-methyluridine, 5-hydroxymethyluridine, and 5-hydroxymethylcytidine; wherein the initiating nucleotide comprises an adenosine or adenosine analog; and wherein the initiating nucleotide of the saRNA is methylated at the 2′O position of the ribose (Cap1).

[0249] In one aspect, described herein is a self-amplifying RNA (saRNA) comprising from 5′ to 3′: (a) a 5′ cap; (b) non-structural protein 1 (nsp1), non-structural protein 2 (nsp2), non-structural protein 3 (nsp3), and/or non-structural protein 4 (nsp4), each derived from at least one virus, wherein the nsP1 comprises at least one conserved 5′ sequence element (5′ CSE); (c) a subgenomic promoter (SGP) derived from at least one virus; (d) a 5′ untranslated region (UTR) derived from at least one virus; (e) at least one cargo of interest; (f) a 3′ untranslated region (UTR) derived from at least one virus, wherein the 3′ UTR comprises at least one 3′-conserved sequence element (3′ CSE); and (g) a poly-A tail; wherein the saRNA comprises at least 25% modified nucleotides, wherein the modified nucleotides are selected from the group consisting of 5-methylcytidine, 5-methyluridine, 5-hydroxymethyluridine, and 5-hydroxymethylcytidine; wherein the initiating nucleotide comprises an adenosine or adenosine analog; and wherein the initiating nucleotide of the saRNA is methylated at the 2′O position of the ribose (Cap1).

[0250] In one aspect, described herein is a self-amplifying RNA (saRNA) comprising: (a) at least one non-structural protein derived from at least one alphavirus; (b) a subgenomic promoter (SGP) derived from at least one alphavirus; and (c) at least one cargo of interest; wherein the saRNA comprises at least 25% modified nucleotides, wherein the modified nucleotides are selected from the group consisting of 5-methylcytidine, 5-methyluridine, 5-hydroxymethyluridine, and 5-hydroxymethylcytidine; wherein the initiating nucleotide comprises an adenosine or adenosine analog; and wherein the initiating nucleotide of the saRNA is methylated at the 2′O position of the ribose (Cap1).

[0251] In one aspect, described herein is a self-amplifying RNA (saRNA) comprising: (a) a 5′ cap; (b) non-structural protein 1 (nsp1), non-structural protein 2 (nsp2), non-structural protein 3 (nsp3), and/or non-structural protein 4 (nsp4), each derived from at least one alphavirus; (c) a subgenomic promoter (SGP) derived from at least one alphavirus; (d) a 5′ untranslated region (UTR) derived from at least one alphavirus; (e) at least one cargo of interest; (f) a 3′ untranslated region (UTR) derived from at least one alphavirus; and (g) a poly-A tail; wherein the saRNA comprises at least 25% modified nucleotides, wherein the modified nucleotides are selected from the group consisting of 5-methylcytidine, 5-methyluridine, 5-hydroxymethyluridine, and 5-hydroxymethylcytidine; wherein the initiating nucleotide comprises an adenosine or adenosine analog; and wherein the initiating nucleotide of the saRNA is methylated at the 2′O position of the ribose (Cap1).

[0252] In one aspect, described herein is a self-amplifying RNA (saRNA) comprising from 5′ to 3′: (a) at least one non-structural protein derived from at least one alphavirus; (b) a subgenomic promoter (SGP) derived from at least one alphavirus; and (c) at least one cargo of interest; wherein the saRNA comprises at least 25% modified nucleotides, wherein the modified nucleotides are selected from the group consisting of 5-methylcytidine, 5-methyluridine, 5-hydroxymethyluridine, and 5-hydroxymethylcytidine; wherein the initiating nucleotide comprises an adenosine or adenosine analog; and wherein the initiating nucleotide of the saRNA is methylated at the 2′O position of the ribose (Cap1).

[0253] In one aspect, described herein is a self-amplifying RNA (saRNA) comprising from 5′ to 3′: (a) a 5′ cap; (b) non-structural protein 1 (nsp1), non-structural protein 2 (nsp2), non-structural protein 3 (nsp3), and/or non-structural protein 4 (nsp4), each derived from at least one alphavirus; (c) a subgenomic promoter (SGP) derived from at least one alphavirus; (d) a 5′ untranslated region (UTR) derived from at least one alphavirus; (e) at least one cargo of interest; (f) a 3′ untranslated region (UTR) derived from at least one alphavirus; and (g) a poly-A tail; wherein the saRNA comprises at least 25% modified nucleotides, wherein the modified nucleotides are selected from the group consisting of 5-methylcytidine, 5-methyluridine, 5-hydroxymethyluridine, and 5-hydroxymethylcytidine; wherein the initiating nucleotide comprises an adenosine or adenosine analog; and wherein the initiating nucleotide of the saRNA is methylated at the 2′O position of the ribose (Cap1).

[0254] In one aspect, described herein is a self-amplifying RNA (saRNA) comprising from 5′ to 3′: (a) a 5′ cap; (b) non-structural protein 1 (nsp1), non-structural protein 2 (nsp2), non-structural protein 3 (nsp3), and/or non-structural protein 4 (nsp4), each derived from at least one alphavirus, wherein the nsP1 comprises at least one conserved 5′ sequence element (5′ CSE); (c) a subgenomic promoter (SGP) derived from at least one alphavirus; (d) a 5′ untranslated region (UTR) derived from at least one alphavirus; (e) at least one cargo of interest; (f) a 3′ untranslated region (UTR) derived from at least one alphavirus, wherein the 3′ UTR comprises at least one 3′-conserved sequence element (3′ CSE); and (g) a poly-A tail; wherein the saRNA comprises at least 25% modified nucleotides, wherein the modified nucleotides are selected from the group consisting of 5-methylcytidine, 5-methyluridine, 5-hydroxymethyluridine, and 5-hydroxymethylcytidine; wherein the initiating nucleotide comprises an adenosine or adenosine analog; and wherein the initiating nucleotide of the saRNA is methylated at the 2′O position of the ribose (Cap1).

[0255] In some embodiments of any of the aspects, a nucleic acid (e.g., DNA) encoding an saRNA as described herein comprises one of SEQ ID NOs: 2 or 5 or a nucleic acid sequence that is at least about 75%, at least about 80%, at least about 85%, at least about 90%, at least about 91%, at least about 92%, at least about 93%, at least about 94%, at least about 95%, at least about 96%, at least about 97%, at least at least about 98%, at least about 99%, or 100%, identical to one of SEQ ID NOs: 2 or 5 that maintains the same function (e.g., self-replication), or a codon-optimized version thereof.

[0256] In some embodiments of any of the aspects, at least one cargo is inserted between the AflII and NdeI cut sites of SEQ ID NO: 2. In some embodiments of any of the aspects, at least one cargo is inserted between nucleotides 7627 and 7628 of SEQ ID NO: 2. In some embodiments of any of the aspects, nucleotides 7634 to 8347 of SEQ ID NO: 5, nucleotides 7617 to 8330 of SEQ ID NO: 6, or nucleotides 7617 to 8330 of SEQ ID NO: 7, each corresponding to mCherry, is replaced with at least one cargo of interest, as described further herein.

[0257] In some embodiments of any of the aspects, an saRNA as described herein comprises one of SEQ ID NOs: 6-7 or a nucleic acid sequence that is at least about 75%, at least about 80%, at least about 85%, at least about 90%, at least about 91%, at least about 92%, at least about 93%, at least about 94%, at least about 95%, at least about 96%, at least about 97%, at least at least about 98%, at least about 99%, or 100%, identical to one of SEQ ID NOs: 6-7 that maintains the same function (e.g., self-replication), or a codon-optimized version thereof.

[0258] Table 6 provides non-limiting examples of domains comprised by exemplary saRNAs, and exemplary template DNAs for saRNAs, as described further herein.

TABLE 6
Exemplary saRNAs

| | | | SEQ ID NOs: 6-7 |
|---|---|---|---|
| | SEQ ID NO: 2 | SEQ ID NO: 5 | (substituted or |
| | (DNA template | (DNA template | unsubstituted |
| | for saRNA, site | for saRNA with | saRNA, |
| | for inserting | exemplary | exemplary |
| | cargo): | mCherry cargo) | mCherry cargo): |
| Domain | nucleotides | nucleotides | nucleotides |
| T7 (see e.g., SEQ ID NO: 3) | 1-17 | 1-17 | N/A |
| 5′ UTR | 18-61 | 18-61 | 1-44 |
| nsP1-4 (see e.g., SEQ ID NOs: 4, 23) | 62-7543 | 62-7543 | 45-7526 |
| 5′ CSE (see e.g., SEQ ID NO: 10) | 149-199 | 149-199 | 132-182 |
| SGP (see e.g., SEQ ID NO: 11) | 7308-7578 | 7308-7578 | 7291-7561 |
| 5′ UTR | 7579-7627 | 7579-7627 | 7562-7610 |
| Cargo (see e.g., | Inserted in | 7634 to 8347 | 7617 to 8330 |
| SEQ ID NOs: 13-16, 22) | between 7627 | (e.g., | (e.g., |
| | and 7628 | mCherry) | mCherry) |
| 3′ UTR | 7629-7742 | 8348-8462 | 8331-8445 |
| 3′ CSE (see e.g., SEQ ID NO: 9) | 7673-7742 | 8393-8462 | 8376-8445 |
| polyA tail | 7743-7768 | 8463-8488 | 8446-8471 |

### Nucleic Acid Modifications

[0259] In some embodiments of any of the aspects, an saRNA as described herein comprises at least one nucleic acid modification, which can increase the efficacy of the saRNA. In some embodiments of any of the aspects, an saRNA as described herein comprises modified nucleotides, e.g., at least 25% modified nucleotides. In some embodiments of any of the aspects, an saRNA as described herein comprises a specific combination of 5′ and initiating nucleotide(s). In some embodiments of any of the aspects, an saRNA as described herein comprises end modifications, backbone modifications, and/or sugar modifications.

### Modified Nucleotides

[0260] In multiple aspects, described herein are saRNAs comprising modified nucleotides. The term “modified nucleotide” refers to any analog of cytidine, adenosine, guanosine, uridine, or pseudouridine. These analogs can include isomers of the nitrogenous base, as well as inclusion or exclusion of chemical groups, both natural occurring and synthetically introduced, on any aspect of the nitrogenous base. It is explicitly stated herein that modifications to the sugar-phosphate backbone are not included in the definition of the term “modified nucleotide.” This exception is not meant to exclude the methylation at the 2′O position of the first and second initiating nucleotides, also referred to as Cap-1 and cap-2 structures.

[0261] In some embodiments of any of the aspects, the modified nucleotides comprise a modified pyrimidine nucleoside phosphate. In some embodiments of any of the aspects, the modified nucleotides comprise a pyrimidine nucleoside phosphate with a moiety on carbon 5 of the pyrimidine. In some embodiments of any of the aspects, the moiety on carbon 5 of the pyrimidine is selected from the group consisting of methyl, ethyl, propyl, trifluoromethyl, hydroxymethyl, hydroxyethyl, and hydroxypropyl functional groups. In some embodiments of any of the aspects, the pyrimidine comprises cytidine and/or uridine.

[0262] In some embodiments of any of the aspects, the pyrimidine comprises cytidine. In some embodiments of any of the aspects, the pyrimidine comprises cytidine, and the modified nucleotide comprises 5-methylcytidine (see e.g., Formula I). In some embodiments of any of the aspects, the pyrimidine comprises cytidine, and the modified nucleotide comprises 5-hydroxymethylcytidine (see e.g., Formula II). In some embodiments of any of the aspects, the pyrimidine comprises cytidine, and the modified nucleotide comprises 5-methylcytidine and 5-hydroxymethylcytidine.

[0263] In some embodiments of any of the aspects, the pyrimidine comprises uridine. In some embodiments of any of the aspects, the pyrimidine comprises uridine, and the modified nucleotide comprises 5-methyluridine (see e.g., Formula III). In some embodiments of any of the aspects, the pyrimidine comprises uridine, and the modified nucleotide comprises 5-hydroxymethyluridine (see e.g., Formula IV). In some embodiments of any of the aspects, the pyrimidine comprises uridine, and the modified nucleotide comprises 5-methyluridine and 5-hydroxymethyluridine.

[0264] In some embodiments of any of the aspects, the modified nucleotides are selected from the group consisting of 5-methylcytidine, 5-methyluridine, 5-hydroxymethyluridine, and 5-hydroxymethylcytidine, or any combination thereof. For example, an saRNA described herein can comprise any of the combinations of modified nucleotides shown in Table 4. In some embodiments of any of the aspects, the modified nucleotides are selected from the group consisting of 5-methylcytidine, 5-methyluridine, and 5-hydroxymethylcytidine, or any combination thereof. In some embodiments of any of the aspects, the modified nucleotides are selected from the group consisting of 5-methyluridine, 5-hydroxymethyluridine, and 5-hydroxymethylcytidine, or any combination thereof.

TABLE 4
Exemplary modified nucleotide combinations in saRNAs described herein.

| | | | |
|---|---|---|---|
| 5-methylcytidine | 5-hydroxymethyl- | 5-methyluridine | 5-hydroxymethyl- |
| (5mC) | cytidine (5OHmC) | (5mU) | uridine (5OHmU) |
| [chemical structure] | [chemical structure] | [chemical structure] | [chemical structure] |
| X | | | |
| | X | | |
| X | X | | |
| | | X | |
| X | | X | |
| | X | X | |
| X | X | X | |
| | | | X |
| X | | | X |
| | X | | X |
| X | X | | X |
| | | X | X |
| X | | X | X |
| | X | X | X |
| X | X | X | X |

[0265] In some embodiments of any of the aspects, the modified nucleotides comprise 5-methyluridine or 5-hydroxymethyluridine, and one or both of 5-methylcytidine and 5-hydroxymethylcytidine, in the same saRNA molecule. In some embodiments of any of the aspects, the modified nucleotides comprise 5-methyluridine and one or both of 5-methylcytidine and 5-hydroxymethylcytidine, in the same saRNA molecule.

[0266] In some embodiments of any of the aspects, an saRNA as described herein comprises 5-methylcytidine as a nucleotide modification in combination with at least one of 5-methyluridine, 5-hydroxymethyluridine, and/or 5-hydroxymethylcytidine, or any combination thereof. In some embodiments of any of the aspects, an saRNA as described herein does not comprise 5-methylcytidine as a nucleotide modification. In some embodiments of any of the aspects, an saRNA as described herein does not comprise 5-methylcytidine as the only nucleotide modification.

[0267] In some embodiments of any of the aspects, an saRNA as described herein comprises at least 25% modified nucleotides. The percentage of modified nucleotides can be determined by dividing the total number of modified nucleotides in the modified saRNA by the total number of the specific nucleotide in the corresponding unmodified saRNA. For example, if an unmodified saRNA comprises 1000 uridine nucleosides, and the modified saRNA comprises 250 5-methyluridines (5mU) in place of the uridines, then the saRNA comprises 25% modified nucleotides. As another non-limiting example, if an unmodified saRNA comprises 1000 uridine nucleosides, and the modified saRNA comprises 125 5-methyluridines (5mU) and 125 5-hydroxymethyluridine (5OHmU) in place of the uridines, then the saRNA comprises 25% modified nucleotides.

[0268] In some embodiments of any of the aspects, the percentage of modified nucleotides in the saRNA can be controlled by the mole percentage of modified nucleotides included in the in vitro transcription (IVT) reaction to generate the saRNA from a DNA template. For example, to generate an saRNA comprising 25% 5-methyluridine (5mU), the IVT reaction mixture can comprise 25 mole % 5-methyluridine (5mU) and 75 mole % uridine.

[0269] In some embodiments of any of the aspects, an saRNA as described herein comprises at least 25% modified nucleotides and at most 100% modified nucleotides, corresponding to at least one specific nucleotide (e.g., a pyrimidine; e.g., cytidine and/or uridine). In some embodiments of any of the aspects, an saRNA as described herein comprises at least 25%, at least 26%, at least 27%, at least 28%, at least 29%, at least 30%, at least 31%, at least 32%, at least 33%, at least 34%, at least 35%, at least 36%, at least 37%, at least 38%, at least 39%, at least 40%, at least 41%, at least 42%, at least 43%, at least 44%, at least 45%, at least 46%, at least 47%, at least 48%, at least 49%, at least 50%, at least 51%, at least 52%, at least 53%, at least 54%, at least 55%, at least 56%, at least 57%, at least 58%, at least 59%, at least 60%, at least 61%, at least 62%, at least 63%, at least 64%, at least 65%, at least 66%, at least 67%, at least 68%, at least 69%, at least 70%, at least 71%, at least 72%, at least 73%, at least 74%, at least 75%, at least 76%, at least 77%, at least 78%, at least 79%, at least 80%, at least 81%, at least 82%, at least 83%, at least 84%, at least 85%, at least 86%, at least 87%, at least 88%, at least 89%, at least 90%, at least 91%, at least 92%, at least 93%, at least 94%, at least 95%, at least 96%, at least 97%, at least 98%, at least 99%, at least 99.1%, at least 99.2%, at least 99.3%, at least 99.4%, at least 99.5%, at least 99.6%, at least 99.7%, at least 99.8%, at least 99.9%, or 100% modified nucleotides, corresponding to at least one specific nucleotide (e.g., a pyrimidine; e.g., cytidine and/or uridine).

[0270] In some embodiments of any of the aspects, an saRNA as described herein comprises at most 25%, at most 26%, at most 27%, at most 28%, at most 29%, at most 30%, at most 31%, at most 32%, at most 33%, at most 34%, at most 35%, at most 36%, at most 37%, at most 38%, at most 39%, at most 40%, at most 41%, at most 42%, at most 43%, at most 44%, at most 45%, at most 46%, at most 47%, at most 48%, at most 49%, at most 50%, at most 51%, at most 52%, at most 53%, at most 54%, at most 55%, at most 56%, at most 57%, at most 58%, at most 59%, at most 60%, at most 61%, at most 62%, at most 63%, at most 64%, at most 65%, at most 66%, at most 67%, at most 68%, at most 69%, at most 70%, at most 71%, at most 72%, at most 73%, at most 74%, at most 75%, at most 76%, at most 77%, at most 78%, at most 79%, at most 80%, at most 81%, at most 82%, at most 83%, at most 84%, at most 85%, at most 86%, at most 87%, at most 88%, at most 89%, at most 90%, at most 91%, at most 92%, at most 93%, at most 94%, at most 95%, at most 96%, at most 97%, at most 98%, at most 99%, at most 99.1%, at most 99.2%, at most 99.3%, at most 99.4%, at most 99.5%, at most 99.6%, at most 99.7%, at most 99.8%, at most 99.9%, or at most 100% modified nucleotides, corresponding to at least one specific nucleotide (e.g., a pyrimidine; e.g., cytidine and/or uridine).

[0271] In some embodiments of any of the aspects, an saRNA as described herein comprises 25% to 35%, 30% to 40%, 35% to 45%, 40% to 50%, 45% to 55%, 50% to 60%, 55% to 65%, 60% to 70%, 65% to 75%, 70% to 80%, 75% to 85%, 80% to 90%, 85% to 95%, 90% to 100%, 95% to 100%, or 99% to 100% modified nucleotides, corresponding to at least one specific nucleotide (e.g., a pyrimidine; e.g., cytidine and/or uridine).

[0272] In some embodiments of any of the aspects, an saRNA as described herein comprises 25%-50% modified nucleotides, corresponding to at least one specific nucleotide (e.g., a pyrimidine; e.g., cytidine and/or uridine). In some embodiments of any of the aspects, an saRNA as described herein comprises 51%-75% modified nucleotides, corresponding to at least one specific nucleotide (e.g., a pyrimidine; e.g., cytidine and/or uridine). In some embodiments of any of the aspects, an saRNA as described herein comprises 75%-99% modified nucleotides, corresponding to at least one specific nucleotide (e.g., a pyrimidine; e.g., cytidine and/or uridine). In some embodiments of any of the aspects, an saRNA as described herein comprises 100% modified nucleotides, corresponding to at least one specific nucleotide (e.g., a pyrimidine; e.g., cytidine and/or uridine).

[0273] In some embodiments of any of the aspects, an saRNA as described herein comprises 100% 5-methylcytidine (5mC) substituted for cytidine. In some embodiments of any of the aspects, an saRNA as described herein comprises 100% 5-hydroxymethyl-cytidine (5OHmC) substituted for cytidine. In some embodiments of any of the aspects, an saRNA as described herein comprises 100% 5-methyluridine (5mU) substituted for uridine. In some embodiments of any of the aspects, an saRNA as described herein comprises 100% 5-hydroxymethyl-uridine (5OHmU) substituted for uridine.

[0274] In some embodiments of any of the aspects, an saRNA as described herein comprises 100% 5-methylcytidine (5mC) substituted for cytidine and 100% 5-methyluridine (5mU) substituted for uridine. In some embodiments of any of the aspects, an saRNA as described herein comprises 100% 5-methylcytidine (5mC) substituted for cytidine and 100% 5-hydroxymethyl-uridine (5OHmU) substituted for uridine. In some embodiments of any of the aspects, an saRNA as described herein comprises 100% 5-hydroxymethyl-cytidine (5OHmC) substituted for cytidine and 100% 5-methyluridine (5mU) substituted for uridine. In some embodiments of any of the aspects, an saRNA as described herein comprises 100% 5-hydroxymethyl-cytidine (5OHmC) substituted for cytidine and 100% 5-hydroxymethyl-uridine (5OHmU) substituted for uridine.

[0275] In some embodiments of any of the aspects, an saRNA comprising at least 25% modified nucleotides expresses at least one cargo at a level greater than or equal to that of a corresponding saRNA with less than 25% modified nucleotides. As used herein, the phrase “corresponding saRNA with less than 25% modified nucleotides” refers to an saRNA with the same base sequence as the RNA comprising at least 25% modified nucleotides, when the base sequence uses adenosine, guanosine, uridine (and analogs thereof), and cytidine (and analogs thereof); modified nucleotides can be classified as analogs of the unmodified nucleotide (e.g., 5-methylcytidine and 5-hydroxymethylcytidine are classified as cytidine analogs; e.g., 5-methyluridine and 5-hydroxymethyluridine are classified as uridine analogs).

[0276] In some embodiments of any of the aspects, an saRNA comprising at least 25% modified nucleotides expresses at least one cargo at a level equal to that of a corresponding saRNA with less than 25% modified nucleotides. In some embodiments of any of the aspects, an saRNA comprising at least 25% modified nucleotides expresses at least one cargo at a level that is at least 1%, at least 5%, at least 10%, at least 20%, at least 30%, at least 40%, at least 50%, at least 60%, at least 70%, at least 80%, at least 90%, at least 100%, at least 2-fold, at least 3-fold, at least 4-fold, at least 5-fold, or at least 10-fold, greater, or more, than that of a corresponding saRNA with less than 25% modified nucleotides.

[0277] In embodiments wherein the saRNA comprises multiple types of modified nucleotides (e.g., at least two of 5-methylcytidine, 5-methyluridine, 5-hydroxymethyluridine, and 5-hydroxymethylcytidine), the percentage of each modified nucleotide can be the same as each other or can be different from each other. As a non-limiting example, in an saRNA comprising 25% modified cytidines, the saRNA can comprise 0% 5mC and 25% 5OHmC; 1% 5mC and 24% 5OHmC; 2% 5mC and 23% 5OHmC; 3% 5mC and 22% 5OHmC; 4% 5mC and 21% 5OHmC; 5% 5mC and 20% 5OHmC; 6% 5mC and 19% 5OHmC; 7% 5mC and 18% 5OHmC; 8% 5mC and 17% 5OHmC; 9% 5mC and 16% 5OHmC; 10% 5mC and 15% 5OHmC; 11% 5mC and 14% 5OHmC; 12% 5mC and 13% 5OHmC; 12.5% 5mC and 12.5% 5OHmC; 13% 5mC and 12% 5OHmC; 14% 5mC and 11% 5OHmC; 15% 5mC and 10% 5OHmC; 16% 5mC and 9% 5OHmC; 17% 5mC and 8% 5OHmC; 18% 5mC and 7% 5OHmC; 19% 5mC and 6% 5OHmC; 20% 5mC and 5% 5OHmC; 21% 5mC and 4% 5OHmC; 22% 5mC and 3% 5OHmC; 23% 5mC and 2% 5OHmC; 24% 5mC and 1% 5OHmC; or 25% 5mC and 0% 5OHmC.

[0278] As a non-limiting example, in an saRNA comprising 25% modified uridines, the saRNA can comprise 0% 5mU and 25% 5OHmU; 1% 5mU and 24% 5OHmU; 2% 5mU and 23% 5OHmU; 3% 5mU and 22% 5OHmU; 4% 5mU and 21% 5OHmU; 5% 5mU and 20% 5OHmU; 6% 5mU and 19% 5OHmU; 7% 5mU and 18% 5OHmU; 8% 5mU and 17% 5OHmU; 9% 5mU and 16% 5OHmU; 10% 5mU and 15% 5OHmU; 11% 5mU and 14% 5OHmU; 12% 5mU and 13% 5OHmU; 12.5% 5mU and 12.5% 5OHmU; 13% 5mU and 12% 5OHmU; 14% 5mU and 11% 5OHmU; 15% 5mU and 10% 5OHmU; 16% 5mU and 9% 5OHmU; 17% 5mU and 8% 5OHmU; 18% 5mU and 7% 5OHmU; 19% 5mU and 6% 5OHmU; 20% 5mU and 5% 5OHmU; 21% 5mU and 4% 5OHmU; 22% 5mU and 3% 5OHmU; 23% 5mU and 2% 5OHmU; 24% 5mU and 1% 5OHmU; or 25% 5mU and 0% 5OHmU.

[0279] In some embodiments of any of the aspects, an saRNA as described herein comprises less than 25% modified nucleotides. In some embodiments of any of the aspects, an saRNA as described herein comprises 0%, at most 1%, at most 2%, at most 3%, at most 4%, at most 5%, at most 6%, at most 7%, at most 8%, at most 9%, at most 10%, at most 11%, at most 12%, at most 13%, at most 14%, at most 15%, at most 16%, at most 17%, at most 18%, at most 19%, at most 20%, at most 21%, at most 22%, at most 23%, at most 24%, at most 25% modified nucleotides. In some embodiments of any of the aspects, an saRNA as described herein does not comprise any modified nucleotides.

[0280] In some embodiments of any of the aspects, the modified nucleotide is not a modified purine. In some embodiments of any of the aspects, the modified nucleotide is not a modified guanosine or adenosine. In some embodiments of any of the aspects, the modified nucleotide is not 7-Deazaadenosine, N1-Methyladenosine, N6-Methyladenosine, 6-Chloropurineriboside, 2-Amino-6-chloropurineriboside, 2-Aminoadenosine, 5-Methoxycytidine, 5-Formylcytidine, 5-Aminoallylcytidine, 5-Hydroxycytidine, Isoguanosine, Thienoguanosine, 2-Aminopurine-riboside, 8-Oxoguanosine, 5-Carboxymethylesteruridine, Thienouridine, 5-Methoxyuridine, 5-Carboxyuridine, 2-Thiouridine, N1-Propylpseudouridine, N1-Methoxymethylpseudouridine, N1-Ethylpseudouridine, Pseudouridine, or N1-Methylpseudouridine.

[0281] In some embodiments of any of the aspects, an saRNA as described herein is substituted using the template of SEQ ID NO: 2 or a nucleic acid sequence that is at least about 75%, at least about 80%, at least about 85%, at least about 90%, at least about 91%, at least about 92%, at least about 93%, at least about 94%, at least about 95%, at least about 96%, at least about 97%, at least at least about 98%, at least about 99%, or 100%, identical to SEQ ID NO: 2 that maintains the same function (e.g., self-replication), or a codon-optimized version thereof. In some embodiments of any of the aspects, at least one cargo is inserted between the AflII and NdeI cut sites of SEQ ID NO: 2. In some embodiments of any of the aspects, at least one cargo is inserted between nucleotides 7627 and 7628 of SEQ ID NO: 2.

[0282] In some embodiments of any of the aspects, an saRNA as described herein saRNA is substituted using the template of SEQ ID NO: 5 or a nucleic acid sequence that is at least about 75%, at least about 80%, at least about 85%, at least about 90%, at least about 91%, at least about 92%, at least about 93%, at least about 94%, at least about 95%, at least about 96%, at least about 97%, at least at least about 98%, at least about 99%, or 100%, identical to SEQ ID NO: 5 that maintains the same function (e.g., self-replication), or a codon-optimized version thereof.

[0283] In some embodiments of any of the aspects, the pyrimidine comprises cytidine, and the modified nucleotide comprises 5-methylcytidine and/or 5-hydroxymethylcytidine, and the substituted saRNA comprises SEQ ID NO: 6 or a nucleic acid sequence that is at least about 75%, at least about 80%, at least about 85%, at least about 90%, at least about 91%, at least about 92%, at least about 93%, at least about 94%, at least about 95%, at least about 96%, at least about 97%, at least at least about 98%, at least about 99%, or 100%, identical to SEQ ID NO: 6 that maintains the same function (e.g., self-replication), or a codon-optimized version thereof.

[0284] In some embodiments of any of the aspects, the pyrimidine comprises uridine, and the modified nucleotide comprises 5-methyluridine and/or 5-hydroxymethyluridine, and the substituted saRNA comprises SEQ ID NO: 7 or a nucleic acid sequence that is at least about 75%, at least about 80%, at least about 85%, at least about 90%, at least about 91%, at least about 92%, at least about 93%, at least about 94%, at least about 95%, at least about 96%, at least about 97%, at least at least about 98%, at least about 99%, or 100%, identical to SEQ ID NO: 7 that maintains the same function (e.g., self-replication), or a codon-optimized version thereof.

### Caps and Initiating Nucleotides

[0285] In multiple aspects, described herein are saRNAs comprising a 5′ cap, which is found on the 5′ end of the saRNA molecule. In some embodiments of any of the aspects, the 5′ cap is derived from at least one virus. In some embodiments of any of the aspects, the 5′ cap is derived from at least one alphavirus. In some embodiments of any of the aspects, the 5′ cap is selected from the group consisting of cap-0, cap-1, and cap-2. The 5′ cap can be involved in translation, nucleocytoplasmic transport, splicing, and/or stabilization of saRNA against 5′ exonucleolytic degradation.

[0286] In eukaryotes, the 5′ cap, referred to as cap-0, is found on the 5′ end of an RNA molecule. Cap-0 consists of a guanine nucleotide connected to mRNA via a 5′ to 5′ triphosphate linkage. This guanosine is methylated on the 7 position directly after capping in vivo by a methyltransferase. Cap-0 can also be referred to as a 7-methylguanylate cap, abbreviated m7G. In some embodiments of any of the aspects, an saRNA as described herein comprises cap-0. In some embodiments of any of the aspects, an saRNA as described herein comprises a m7G 5′ cap. ARCA (Anti-Reverse Cap Analog) consisting of 3′-0-Me-m7G(5′)ppp(5′)G is a non-limiting example of a reagent for producing an saRNA comprising a 5′ Cap0.

[0287] In multicellular eukaryotes and some viruses, further 5′ cap modifications exist, including the methylation of the 2′ hydroxy-groups of the first 2 ribose sugars of the 5′ end of the RNA. cap-1 has a methylated 2′-hydroxy group on the first ribose sugar, while cap-2 has methylated 2′-hydroxy groups on the first two ribose sugars. In some embodiments of any of the aspects, the initiating nucleoside of an saRNA as described herein is methylated at the 2′O position of the ribose (Cap1). In some embodiments of any of the aspects, Cap1 has the following chemical structure: m7GpppNm. CLEANCAP AU consisting of m7G(5′)ppp(5′)(2′OMeA)pU is a non-limiting example of a reagent for producing an saRNA comprising a 5′ Cap1. In some embodiments of any of the aspects, the initiating nucleotide and the subsequent nucleotide of an saRNA as described herein are both methylated at the 2′O position of the ribose (Cap2). In some embodiments of any of the aspects, Cap2 has the following chemical structure: m7GpppNmNm.

[0288] In some embodiments of any of the aspects, the initiating nucleotide directly proximal to the 5′ cap in an saRNA as described herein comprises an adenosine or adenosine analog. In some embodiments of any of the aspects, the initiating nucleotide directly proximal to the 5′ cap in an saRNA as described herein comprises a guanosine or guanosine analog. In some embodiments of any of the aspects, the first two initiating nucleotides directly proximal to the 5′ cap in an saRNA as described herein comprises: in position 1 an adenosine or adenosine analog and in position 2 a uridine or a uridine analog. In some embodiments of any of the aspects, the first three initiating nucleotides directly proximal to the 5′ cap in an saRNA as described herein comprises: in position 1 a guanosine or guanosine analog, in position 2 an adenosine or adenosine analog, and in position 3 a uridine or a uridine analog.

[0289] In some embodiments of any of the aspects, the initiating nucleotide of an saRNA as described herein comprises an adenosine or adenosine analog, and the initiating nucleotide of the saRNA is methylated at the 2′O position of the ribose (Cap1).

[0290] In some embodiments of any of the aspects, the initiating nucleotide of an saRNA as described herein comprises an adenosine or adenosine analog, and the initiating nucleotide and the subsequent nucleotide of the saRNA are both methylated at the 2′O position of the ribose (Cap2).

[0291] In some embodiments of any of the aspects, the initiating nucleotide of an saRNA as described herein comprises a guanosine or guanosine analog, and wherein the initiating nucleotide of the saRNA is methylated at the 2′O position of the ribose (Cap1).

[0292] In some embodiments of any of the aspects, the initiating nucleotide of an saRNA as described herein comprises a guanosine or guanosine analog, and wherein the initiating nucleotide and the subsequent nucleotide of the saRNA are both methylated at the 2′O position of the ribose (Cap2).

[0293] In some embodiments of any of the aspects, the initiating nucleotide of an saRNA as described herein comprises an adenosine or adenosine analog, and the 5′ cap is a m7G 5′ cap-0. In some embodiments of any of the aspects, the initiating nucleotide of an saRNA as described herein comprises a guanosine or guanosine analog, and the 5′ cap is a m7G 5′ cap-0.

### Non-Limiting Examples of Nucleic Acid Modifications

[0294] It is further contemplated herein that the nucleic acids described herein (e.g., DNA, saRNA) can be chemically modified to enhance stability or other beneficial characteristics. The nucleic acids described herein can be synthesized and/or modified by methods well established in the art, such as those described in “Current protocols in nucleic acid chemistry,” Beaucage, S. L. et al. (Edrs.), John Wiley & Sons, Inc., New York, NY, USA, which is hereby incorporated herein by reference. Modifications include, for example, (a) end modifications, e.g., 5′ end modifications (phosphorylation, conjugation, inverted linkages, etc.) 3′ end modifications (conjugation, DNA nucleotides, inverted linkages, etc.), (b) sugar modifications (e.g., at the 2′ position or 4′ position) or replacement of the sugar, as well as (c) backbone modifications, including modification or replacement of the phosphodiester linkages. Specific examples of nucleic acid compounds useful in the embodiments described herein include, but are not limited, to nucleic acids containing modified backbones or no natural internucleoside linkages. Nucleic acids having modified backbones include, among others, those that do not have a phosphorus atom in the backbone. For the purposes of this specification, and as sometimes referenced in the art, modified nucleic acids that do not have a phosphorus atom in their internucleoside backbone can also be considered to be oligonucleosides. In some embodiments of any of the aspects, the modified nucleic acid can have a phosphorus atom in its internucleoside backbone.

[0295] Modified nucleic acid backbones can include, for example, phosphorothioates, chiral phosphorothioates, phosphorodithioates, phosphotriesters, aminoalkylphosphotriesters, methyl and other alkyl phosphonates including 3′-alkylene phosphonates and chiral phosphonates, phosphinates, phosphoramidates including 3′-amino phosphoramidate and aminoalkylphosphoramidates, thionophosphoramidates, thionoalkylphosphonates, thionoalkylphosphotriesters, and boranophosphates having normal 3′-5′ linkages, 2′-5′ linked analogs of these, and those) having inverted polarity wherein the adjacent pairs of nucleoside units are linked 3′-5′ to 5′-3′ or 2′-5′ to 5′-2′. Various salts, mixed salts and free acid forms are also included. Modified nucleic acid backbones that do not include a phosphorus atom therein have backbones that are formed by short chain alkyl or cycloalkyl internucleoside linkages, mixed heteroatoms and alkyl or cycloalkyl internucleoside linkages, or one or more short chain heteroatomic or heterocyclic internucleoside linkages. These include those having morpholino linkages (formed in part from the sugar portion of a nucleoside); siloxane backbones; sulfide, sulfoxide and sulfone backbones; formacetyl and thioformacetyl backbones; methylene formacetyl and thioformacetyl backbones; alkene containing backbones; sulfamate backbones; methyleneimino and methylenehydrazino backbones; sulfonate and sulfonamide backbones; amide backbones; others having mixed N, O, S and CH₂ component parts, and oligonucleosides with heteroatom backbones, and in particular —CH₂—NH—CH₂—, —CH₂—N(CH₃)—O—CH₂—[known as a methylene (methylimino) or MMI backbone], —CH₂—O—N(CH₃)—CH₂—, —CH₂—N(CH₃)—N(CH₃)—CH₂— and —N(CH₃)—CH₂—CH₂—[wherein the native phosphodiester backbone is represented as —O—P—O—CH₂—].

[0296] In other nucleic acid mimetics, both the sugar and the internucleoside linkage, i.e., the backbone, of the nucleotide units are replaced with novel groups. The base units are maintained for hybridization with an appropriate nucleic acid target compound. One such oligomeric compound, an RNA mimetic that has been shown to have excellent hybridization properties, is referred to as a peptide nucleic acid (PNA). In PNA compounds, the sugar backbone of an RNA is replaced with an amide containing backbone, in particular an aminoethylglycine backbone. The nucleobases are retained and are bound directly or indirectly to aza nitrogen atoms of the amide portion of the backbone.

[0297] The nucleic acid can also be modified to include one or more locked nucleic acids (LNA). A locked nucleic acid is a nucleotide having a modified ribose moiety in which the ribose moiety comprises an extra bridge connecting the 2′ and 4′ carbons. This structure effectively “locks” the ribose in the 3′-endo structural conformation. The addition of locked nucleic acids to siRNAs has been shown to increase siRNA stability in serum, and to reduce off-target effects (Elmen, J. et al., (2005) Nucleic Acids Research 33(1):439-447; Mook, Or. et al., (2007) Mol. Canc. Ther. 6(3):833-843; Grunweller, A. et al., (2003) Nucleic Acids Research 31(12):3185-3193).

[0298] Modified nucleic acids can also contain one or more substituted sugar moieties. The nucleic acids described herein can include one of the following at the 2′ position: OH; F; O-, S-, or N-alkyl; O-, S-, or N-alkenyl; O-, S- or N-alkynyl; or O-alkyl-O-alkyl, wherein the alkyl, alkenyl and alkynyl may be substituted or unsubstituted C1 to C10 alkyl or C2 to C10 alkenyl and alkynyl. Exemplary suitable modifications include O[(CH₂)ₙO] mCH₃, O(CH₂)ₙOCH₃, O(CH₂)ₙNH₂, O(CH₂)ₙCH₃, O(CH₂)ₙONH₂, and O(CH₂)ₙON[(CH₂)ₙCH₃)]₂, where n is from 1 to about 10. In some embodiments of any of the aspects, nucleic acids include one of the following at the 2′ position: C1 to C10 lower alkyl, substituted lower alkyl, alkaryl, aralkyl, O-alkaryl or O-aralkyl, SH, SCH₃, OCN, Cl, Br, CN, CF₃, OCF₃, SOCH₃, SO₂CH₃, ONO₂, NO₂, N₃, NH₂, heterocycloalkyl, heterocycloalkaryl, aminoalkylamino, polyalkylamino, substituted silyl, an RNA cleaving group, a reporter group, an intercalator, a group for improving the pharmacokinetic properties of a nucleic acid, or a group for improving the pharmacodynamic properties of a nucleic acid, and other substituents having similar properties. In some embodiments of any of the aspects, the modification includes a 2′ methoxyethoxy (2′-O—CH₂CH₂OCH₃, also known as 2′-O-(2-methoxyethyl) or 2′-MOE) (Martin et al., Helv. Chim. Acta, 1995, 78:486-504) i.e., an alkoxy-alkoxy group. Another exemplary modification is 2′-dimethylaminooxyethoxy, i.e., a O(CH₂)₂ON(CH₃)₂ group, also known as 2′-DMAOE, as described in examples herein below, and 2′-dimethylaminoethoxyethoxy (also known in the art as 2′-O-dimethylaminoethoxyethyl or 2′-DMAEOE), i.e., 2′-O—CH₂—O—CH₂—N(CH₂)₂, also described in examples herein below.

[0299] Other modifications include 2′-methoxy (2′-OCH₃), 2′-aminopropoxy (2′-OCH₂CH₂CH₂NH₂) and 2′-fluoro (2′-F). Similar modifications can also be made at other positions on the nucleic acid, particularly the 3′ position of the sugar on the 3′ terminal nucleotide or in 2′-5′ linked dsRNAs and the 5′ position of 5′ terminal nucleotide. Nucleic acids may also have sugar mimetics such as cyclobutyl moieties in place of the pentofuranosyl sugar.

[0300] The preparation of the modified nucleic acids, backbones, and sugars described above are well known in the art.

[0301] Another modification of a nucleic acid featured in the invention involves chemically linking to the nucleic acid to one or more ligands, moieties or conjugates that enhance the activity, cellular distribution, pharmacokinetic properties, or cellular uptake of the nucleic acid. Such moieties include but are not limited to lipid moieties such as a cholesterol moiety (Letsinger et al., Proc. Natl. Acid. Sci. USA, 1989, 86: 6553-6556), cholic acid (Manoharan et al., Biorg. Med. Chem. Let., 1994, 4:1053-1060), a thioether, e.g., beryl-S-tritylthiol (Manoharan et al., Ann. N.Y. Acad. Sci., 1992, 660:306-309; Manoharan et al., Biorg. Med. Chem. Let., 1993, 3:2765-2770), a thiocholesterol (Oberhauser et al., Nucl. Acids Res., 1992, 20:533-538), an aliphatic chain, e.g., dodecandiol or undecyl residues (Saison-Behmoaras et al., EMBO J, 1991, 10:1111-1118; Kabanov et al., FEBS Lett., 1990, 259:327-330; Svinarchuk et al., Biochimie, 1993, 75:49-54), a phospholipid, e.g., di-hexadecyl-rac-glycerol or triethyl-ammonium 1,2-di-O-hexadecyl-rac-glycero-3-phosphonate (Manoharan et al., Tetrahedron Lett., 1995, 36:3651-3654; Shea et al., Nucl. Acids Res., 1990, 18:3777-3783), a polyamine or a polyethylene glycol chain (Manoharan et al., Nucleosides & Nucleotides, 1995, 14:969-973), or adamantane acetic acid (Manoharan et al., Tetrahedron Lett., 1995, 36:3651-3654), a palmityl moiety (Mishra et al., Biochim. Biophys. Acta, 1995, 1264:229-237), or an octadecylamine or hexylamino-carbonyloxycholesterol moiety (Crooke et al., J. Pharmacol. Exp. Ther., 1996, 277:923-937).

### Exemplary Viral Components

[0302] In some embodiments of any of the aspects, at least one component of the saRNAs described herein are derived from at least one virus. As non-limiting examples, at least one non-structural protein, a subgenomic promoter (SGP), 5′ conserved sequence element (5′ CSE), 5′ untranslated region (5′ UTR), 3′ untranslated region (3′ UTR), and/or 3′ at least one conserved sequence element (3′ CSE) can be derived from at least one virus. For example, in some embodiments, the saRNAs described herein can self-replicate due to inclusion of conserved sequence elements (CSEs) derived from at least one virus, located on the 5′ and 3′ ends of the RNA in combination with protein machinery (RNA-dependent RNA polymerase or RdRp derived from at least one virus). In some embodiments, the saRNA can also include amplification of a sub-genomic RNA, which can encode the cargo of interest, from a subgenomic promoter (SGP) derived from a virus that is recognized by the RdRp.

[0303] As used herein, the term “derived from” refers to the origin or source, and can include naturally occurring, recombinant, unpurified, or purified molecules, such as nucleic acids or polypeptides. In some embodiments of any of the aspects, “derived from” includes mutation and/or maturation of any of the nucleic acids or polypeptides as described herein. As a non-limiting example, at least one of the non-structural proteins (nsp1-4), each derived from at least one virus, can be mutated and/or matured compared to the wild-type sequence(s), e.g., to increase the amount and/or duration of cargo expression. Non-limiting examples of non-structural protein mutations include: nsP2 A1979G (nucleic acid), G656G (amino acid); nsP2 G3936C (nucleic acid), G1309R (amino acid); nsP3 A4311G (nucleic acid), K1434E (amino acid): nsP3 A4758G (nucleic acid), S1583G (amino acid); nsP3 G4796T (nucleic acid), E1595D (amino acid); and/or nsP3 G4944A (nucleic acid), V1645M (amino acid). As another non-limiting example, at least one of the non-coding conserved sequence elements (e.g., 5′ UTR, 5′ CSE, SGP, 3′ CSE, 3′ UTR), each derived from at least one virus, can be mutated and/or matured compared to the wild-type sequence(s), e.g., to increase the replication rate of the RNA. For example, at least one of the non-coding conserved sequence elements (e.g., 5′ UTR) can be mutated or matured to comprise A-rich regions, which can accelerate RNA replication. See e.g., Li et al., Scientific Reports volume 9, Article number: 6932 (2019); Perkovic et al., Molecular Therapy Volume 31, Issue 6, P1636-1646 (2023); the contents of each of which are incorporated herein by reference in their entireties.

[0304] In some embodiments of any of the aspects, an nsp1, nsp2, nsp3, nsp4, SGP, 5′ UTR, 3′ UTR, 5′ CSE, and/or 3′ CSE in an saRNA described herein are derived from the same virus. In some embodiments of any of the aspects, at least one of an nsp1, nsp2, nsp3, nsp4, SGP, 5′ UTR, 3′ UTR, 5′ CSE, and/or 3′ CSE in an saRNA described herein are derived from different viruses.

[0305] In some embodiments of any of the aspects, the component, e.g., RNA or polypeptide, derived from at least one virus, comprises the naturally occurring component, e.g., RNA or polypeptide, in the virus or is at least about 75%, at least about 80%, at least about 85%, at least about 90%, at least about 91%, at least about 92%, at least about 93%, at least about 94%, at least about 95%, at least about 96%, at least about 97%, at least at least about 98%, at least about 99%, or 100%, identical to the naturally occurring component, e.g., RNA or polypeptide, in the virus.

[0306] In some embodiments of any of the aspects, the component, e.g., RNA or polypeptide, derived from at least one virus, maintains the function of the naturally occurring component, e.g., RNA or polypeptide, in the virus or maintains at least about 75%, at least about 80%, at least about 85%, at least about 90%, at least about 91%, at least about 92%, at least about 93%, at least about 94%, at least about 95%, at least about 96%, at least about 97%, at least at least about 98%, at least about 99%, or 100%, of the function of to the naturally occurring component, e.g., RNA or polypeptide, in the virus.

[0307] The phrase “derived from at least one virus” language can include any virus. Non-limiting examples of such viruses include: Venezuela Equine Encephalitis Virus (VEEV), Semliki Forest Virus (SFV), Sindbis Virus (SIN), Chikungunya Virus (CHIKV), Eastern Equine Encephalitis Virus (EEEV), Mayaro Virus (MAYV), Getah Virus (GETV), Ross River Virus (RRV), Una Virus (UNAV), Middleburg Virus (MIDV), O'nyong nyong virus (ONNV), Barmah Forest Virus (BFV), Mucambo Virus (MUCV), Tonate Virus (TONV), Everglades Virus (EVEV), Rio Negro Virus (RNV), Turnip Rosette Virus (TROV), Highlands J Virus (HJV), Western Equine Encephalitis Virus (WEEV), Fig Mosaic Emaravirus (FMV), Aura Virus (AURAV), Kunjin Virus (KUN), Measles virus (MV), Coronavirus (CoV), Rabies virus (RABV), and Vesicular Stomatitis virus (VSV).

[0308] In some embodiments of any of the aspects, at least one component of the saRNAs described herein are derived from at least one alphavirus. Non-limiting examples of such alphaviruses include: Aura Virus (AURAV), Barmah Forest Virus (BFV), Bebaru virus, Caaingua virus, Cabassou virus, Chikungunya Virus (CHIKV), Eastern Equine Encephalitis Virus (EEEV), Eliat virus, Everglades Virus (EVEV), Fort Morgan virus, Getah Virus (GETV), Highlands J Virus (HJV), Madariaga virus, Mayaro Virus (MAYV), Middleburg Virus (MIDV), Mosso das Pedras virus, Mucambo Virus (MUCV), Ndumu virus, O'nyong nyong virus (ONNV), Pixuna virus, Rio Negro Virus (RNV), Ross River Virus (RRV), Salmon pancreas disease virus, Semliki Forest Virus (SFV), Sindbis Virus (SIN), Southern elephant seal virus, Tonate Virus (TONV), Trocara virus, Una Virus (UNAV), Venezuela Equine Encephalitis Virus (VEEV), Western Equine Encephalitis Virus (WEEV), and Whataroa virus. In some embodiments of any of the aspects, at least one component of the saRNAs described herein are derived from Venezuela Equine Encephalitis Virus (VEEV).

[0309] Alphavirus is a genus of RNA viruses, the sole genus in the Togaviridae family. Alphaviruses belong to group IV of the Baltimore classification of viruses, with a positive-sense, single-stranded RNA genome. The alphaviruses are small, spherical, enveloped viruses with a genome of a single strand of positive-sense RNA. The total genome length ranges between 11,000 and 12,000 nucleotides, and the genome has a 5′ cap and a 3′ poly-A tail. The four non-structural protein genes are encoded in the 5′ two-thirds of the genome, while the three structural proteins are translated from a subgenomic mRNA colinear with the 3′ one-third of the genome. There are two open reading frames (ORFs) in the genome, nonstructural and structural. The first is non-structural and encodes proteins (nsP1-nsP4) necessary for transcription and replication of viral RNA. The second encodes three structural proteins: the core nucleocapsid protein C, and the envelope proteins P62 and E1.

[0310] In some embodiments of any of the aspects, the saRNAs described herein do not comprise structural proteins derived from at least one virus. In some embodiments of any of the aspects, the saRNAs described herein do not comprise structural proteins derived from at least one alphavirus. In some embodiments of any of the aspects, the saRNAs described herein do not comprise structural proteins derived from VEEV (e.g., do not comprise C, P62, or E1).

[0311] In some embodiments of any of the aspects, the saRNAs described herein do not comprise capsid or envelope proteins derived from at least one virus. In some embodiments of any of the aspects, the saRNAs described herein do not comprise capsid or envelope proteins derived from at least one alphavirus. In some embodiments of any of the aspects, the saRNAs described herein do not comprise capsid or envelope proteins derived from VEEV.

### Non-Structural Proteins

[0312] In some embodiments of any of the aspects, the saRNAs described herein comprise at least one non-structural protein derived from at least one virus. In some embodiments of any of the aspects, the saRNAs described herein comprise at least one non-structural protein derived from at least one alphavirus. In some embodiments of any of the aspects, the saRNAs described herein comprise at least one non-structural protein derived from VEEV. Alphavirus nonstructural proteins can be selected from the four nonstructural proteins (nsP1-4) which are produced as a single polyprotein constitute the virus' replication machinery. For example, in VEEV and other alphaviruses, nsp1 is a methyl/guanylyltransferase involved with RNA capping; nsp2 is a cysteine protease, helicase, and NTPase; nsp3 is a polyADP-ribose hydroxylase; and nsp4 is an RNA-dependent RNA polymerase (RdRp). In some embodiments of any of the aspects, the saRNAs described herein comprise at least one non-structural protein that functions as an RNA-dependent RNA polymerase (RdRp) and allows for replication of the saRNA (e.g., +RNA to −RNA to +RNA) and/or production of the subgenomic RNA (e.g., −RNA to sgRNA using the SGP).

[0313] In some embodiments of any of the aspects, the saRNAs described herein comprise an nsP1 derived from an alphavirus, an nsP2 derived from an alphavirus, an nsP3 derived from an alphavirus, and/or an nsP4 derived from an alphavirus, or any combination thereof. For example, an saRNA described herein can comprise any of the combinations of non-structural proteins shown in Table 5, each derived from an alphavirus, which can be the same or different species of alphavirus. As a non-limiting example, an saRNA described herein can comprise an nsP1 derived from an alphavirus, an nsP2 derived from an alphavirus, an nsP3 derived from an alphavirus, and an nsP4 derived from an alphavirus. In some embodiments of any of the aspects, an saRNA described herein comprises from 5′ to 3′: nsP1, nsP2, nsP3, and nsP4, each derived from a species of alphavirus, which each can be the same or different species of alphavirus. In some embodiments of any of the aspects, the 5′ region of an saRNA described herein comprises from 5′ to 3′: nsP1, nsP2, nsP3, and nsP4, each derived from a species of alphavirus, which each can be the same or different species of alphavirus.

TABLE 5
Exemplary non-structural protein combinations
in saRNAs described herein

| nsP1 | nsP2 | nsP3 | nsP4 |
|---|---|---|---|
| X | | | |
| | X | | |
| X | X | | |
| | | X | |
| X | | X | |
| | X | X | |
| X | X | X | |
| | | | X |
| X | | | X |
| | X | | X |
| X | X | | X |
| | | X | X |
| X | | X | X |
| | X | X | X |
| X | X | X | X |

[0314] In some embodiments of any of the aspects, the saRNAs described herein comprise an nsP1 derived from a strain of VEEV, an nsP2 derived from a strain of VEEV, an nsP3 derived from a strain of VEEV, and/or an nsP4 derived from a strain of VEEV, or any combination thereof. For example, an saRNA described herein can comprise any of the combinations of non-structural proteins shown in Table 5, each derived from a strain of VEEV, which can be the same or different strains of VEEV. As a non-limiting example, an saRNA described herein can comprise an nsP1 derived from a strain of VEEV, an nsP2 derived from a strain of VEEV, an nsP3 derived from a strain of VEEV, and an nsP4 derived from a strain of VEEV. In some embodiments of any of the aspects, an saRNA described herein comprises from 5′ to 3′: nsP1, nsP2, nsP3, and nsP4, each derived from a strain of VEEV, which each can be the same or different strain of VEEV. In some embodiments of any of the aspects, the 5′ region of an saRNA described herein comprises from 5′ to 3′: nsP1, nsP2, nsP3, and nsP4, each derived from a strain of VEEV, which each can be the same or different strain of VEEV.

[0315] In some embodiments of any of the aspects, an saRNA described herein encodes for the amino acid sequence of SEQ ID NO: 4 and/or SEQ ID NO: 23, or an amino acid sequence that is at least about 75%, at least about 80%, at least about 85%, at least about 90%, at least about 91%, at least about 92%, at least about 93%, at least about 94%, at least about 95%, at least about 96%, at least about 97%, at least at least about 98%, at least about 99%, or 100%, identical to SEQ ID NO: 4 and/or SEQ ID NO: 23, that maintains its function (e.g., at least one nsP1-nsP4 function; e.g., saRNA replication; e.g., an RNA-dependent RNA polymerase).

[0316] In some embodiments of any of the aspects, an saRNA described herein comprises nonstructural proteins comprising one of nucleotides 62-7543 of SEQ ID NO: 2 (DNA or the corresponding RNA sequence), nucleotides 62-7543 of SEQ ID NO: 5, nucleotides 45-7526 of SEQ ID NO: 6, nucleotides 45-7526 of SEQ ID NO: 7, or a nucleic acid sequence that is at least about 75%, at least about 80%, at least about 85%, at least about 90%, at least about 91%, at least about 92%, at least about 93%, at least about 94%, at least about 95%, at least about 96%, at least about 97%, at least at least about 98%, at least about 99%, or 100%, identical to one of nucleotides 62-7543 of SEQ ID NO: 2 (DNA or the corresponding RNA sequence), nucleotides 62-7543 of SEQ ID NO: 5, nucleotides 45-7526 of SEQ ID NO: 6, nucleotides 45-7526 of SEQ ID NO: 7, or a corresponding RNA sequence from codon-optimized version thereof.

### Conserved Sequence Elements

[0317] In some embodiments of any of the aspects, the saRNAs described herein comprise at least one conserved sequence element (CSE) derived from at least one virus. In some embodiments of any of the aspects, the saRNAs described herein comprise at least one conserved sequence element (CSE) derived from at least one alphavirus. In some embodiments of any of the aspects, the conserved sequence element(s) are conserved across multiple species of alphaviruses. In some embodiments of any of the aspects, the saRNAs described herein comprise at least one conserved sequence element (CSE) derived from VEEV. In some embodiments of any of the aspects, the conserved sequence element(s) can interact with the RdRp encoded by the saRNA (e.g., nsP1-4) and allow for replication of the saRNA. In some embodiments of any of the aspects, the conserved sequence element(s) comprise secondary structures (e.g., hairpins) for interaction with the RdRp encoded by the saRNA (e.g., nsP1-4). In some embodiments of any of the aspects, the conserved sequence element(s) are non-coding, i.e., do not encode polypeptides and are not translated.

[0318] As a non-limiting example, analysis of alphavirus genome sequences has identified four sequence elements conserved across the genus (CSEs): the 5′ untranslated region (UTR), a 51 nt 5′ CSE within nsP1, the subgenomic promoter (or junction) region, and a 3′ CSE within a 3′ UTR. In some embodiments of any of the aspects, an saRNA as described herein comprises at least one of the following conserved sequence elements, each derived from at least one alphavirus: a 5′ UTR, a 5′ CSE, a SGP, and/or a 3′ CSE within a 3′ UTR. In some embodiments of any of the aspects, an saRNA as described herein comprises a 5′ UTR, a 5′ CSE, a SGP, and/or a 3′ CSE within a 3′ UTR, each derived from at least one alphavirus. In some embodiments of any of the aspects, an saRNA as described herein comprises a 5′ UTR, a 5′ CSE, a SGP, and/or a 3′ CSE within a 3′ UTR, each derived from VEEV. See e.g., Hyde et al., “The 5′ and 3′ ends of alphavirus RNAs—Non-coding is not non-functional,” Virus Research 206 (2015): 99-107, the contents of which are incorporated here by reference in their entirety.

[0319] In some embodiments of any of the aspects, the saRNAs described herein comprise at least one 5′ conserved sequence element (5′ CSE) derived from at least one virus. In some embodiments of any of the aspects, the saRNAs described herein comprise at least one 5′ conserved sequence element (5′ CSE) derived from at least one alphavirus. In some embodiments of any of the aspects, the saRNAs described herein comprise at least one 5′ conserved sequence element (5′ CSE) derived from VEEV.

[0320] The conserved 5′ sequence element (5′ CSE) can be contained in the nsp1 coding sequence. The conserved 5′ sequence element (5′ CSE) can be about 51 nucleotides (nt) long, or about 40-60 nt long. The 5′ CSE can be dependent on viral machinery (e.g., nsP1-4) used to generate the saRNA. For VEEV, the 5′ CSE can comprise: aagcaggtcactgataatgaccatgctaatgccagagcgttttcgcatctg, SEQ ID NO: 10 (see e.g., nucleotides 149-199 of SEQ ID NO: 2, nucleotides 149-199 of SEQ ID NO: 5, nucleotides 132-182 of SEQ ID NOs: 6-7).

[0321] In some embodiments of any of the aspects, the saRNAs described herein comprise at least one 3′ conserved sequence element (3′ CSE) derived from at least one virus. In some embodiments of any of the aspects, the saRNAs described herein comprise at least one 3′ conserved sequence element (3′ CSE) derived from at least one alphavirus. In some embodiments of any of the aspects, the saRNAs described herein comprise at least one 3′ conserved sequence element (3′ CSE) derived from VEEV.

[0322] The conserved 3′-conserved sequence element (3′ CSE) can be encoded in the 3′ UTR. The conserved 3′ sequence element (3′ CSE) can be about 70 nucleotides (nt) long, or about 60-80 nt long. The 3′ CSE can be dependent on the viral machinery (e.g., nsP1-4) encoded in the saRNA to replicate itself. For VEEV, the 3′ CSE is in the 3′ UTR sequence and can comprise: catgccgccttaaaatttttattttattttttcttttcttttccgaatcggattttgtttttaatatttc, SEQ ID NO: 9 (see e.g., nucleotides 7673-7742 of SEQ ID NO: 2, nucleotides 8393-8462 of SEQ ID NO: 5, nucleotides 8376-8445 of SEQ ID NOs: 6-7). The 3′CSE, which is highly conserved in at least 27 alphaviral genomes, can comprise an 85% to 90% AU-rich sequence.

[0323] In some embodiments of any of the aspects, a conserved sequence element comprises SEQ ID NO: 9, SEQ ID NO: 10 or a nucleic acid sequence that is at least about 75%, at least about 80%, at least about 85%, at least about 90%, at least about 91%, at least about 92%, at least about 93%, at least about 94%, at least about 95%, at least about 96%, at least about 97%, at least at least about 98%, at least about 99%, or 100%, identical to SEQ ID NO: 9 or SEQ ID NO: 10, that maintains its function (e.g., at least one nsP1-nsP4 function; e.g., saRNA replication; e.g., an RNA-dependent RNA polymerase).

[0324] In some embodiments of any of the aspects, the saRNAs described herein comprise at least one 5′ conserved sequence element (5′ CSE) and at least one 3′ conserved sequence element (3′ CSE), each derived from at least one virus. In some embodiments of any of the aspects, the saRNAs described herein comprise at least one 5′ conserved sequence element (5′ CSE) and at least one 3′ conserved sequence element (3′ CSE), each derived from at least one alphavirus. In some embodiments of any of the aspects, the saRNAs described herein comprise at least one 5′ conserved sequence element (5′ CSE) and at least one 3′ conserved sequence element (3′ CSE), each derived from VEEV.

[0325] In some embodiments of any of the aspects, the saRNAs described herein comprise at least one subgenomic promoter (SGP) derived from at least one virus. In some embodiments of any of the aspects, the SGP is 3′ (downstream) of the at least one nonstructural proteins and 5′ (upstream) of the 5′ UTR and at least one cargo. In some embodiments of any of the aspects, the saRNAs described herein comprise at least one subgenomic promoter (SGP) derived from at least one alphavirus. In some embodiments of any of the aspects, the saRNAs described herein comprise at least one subgenomic promoter (SGP) derived from VEEV.

[0326] The subgenomic promoter (SGP) can be located at the end of nsp4 and contains sequences within and after the coding sequence of nsp4. The SGP can be dependent on viral machinery (e.g., nsP1-4; e.g., RdRP) to generate the subgenomic RNA (sgRNA) of the saRNA. The subgenomic promoter controls expression of sgRNA from anti-sense template RNA independently of its genomic length counterpart. In some embodiments of any of the aspects, the strength of the subgenomic promoter (SGP) leads to more copies of the sgRNA compared to the full-length +RNA. In the context of alphaviruses, the higher concentration of the sgRNA compared to the full-length +RNA can allow for a higher concentration of translated structural proteins compared to translated non-structural proteins. In the context of the saRNAs described herein, the higher concentration of the sgRNA compared to the full-length +RNA can allow for a higher concentration of the at least one cargo (which can be a translated protein or a non-coding RNA, as described further herein) compared to translated non-structural proteins.

[0327] The sequence for the SGP in VEEV can comprise: SEQ ID NO: 11, agcttggcaaacctctggcagcagacgatgaacatgatgatgacaggagaagggcattgcatgaagagtcaacacgctggaaccgagtgggtattcttt cagagetgtgcaaggcagtagaatcaaggtatgaaaccgtaggaaettecatcatagttatggecatgactactetagetagcagtgttaaatcatteaget acctgagaggggcccctataactctctacggctaacctgaatggactacgacatagtctagtccgccaag (see e.g., nucleotides 7308-7578 of SEQ ID NO: 2; see e.g., nucleotides 7308-7578 of SEQ ID NO: 5; see e.g., nucleotides 7291-7561 of SEQ ID NOs: 6-7).

[0328] In some embodiments of any of the aspects, a subgenomic promoter (SGP) comprises SEQ ID NO: 11 or a nucleic acid sequence that is at least about 75%, at least about 80%, at least about 85%, at least about 90%, at least about 91%, at least about 92%, at least about 93%, at least about 94%, at least about 95%, at least about 96%, at least about 97%, at least at least about 98%, at least about 99%, or 100%, identical to SEQ ID NO: 11, that maintains its function (e.g., replication of the subgenomic RNA (sgRNA); e.g., replication of the at least one cargo encoded by the saRNA).

[0329] In some embodiments of any of the aspects, the saRNAs described herein comprise at least one 5′ conserved sequence element (5′ CSE), at least one 3′ conserved sequence element (3′ CSE), and at least one subgenomic promoter (SGP), each derived from at least one virus. In some embodiments of any of the aspects, the saRNAs described herein comprise at least one 5′ conserved sequence element (5′ CSE), at least one 3′ conserved sequence element (3′ CSE), and at least one subgenomic promoter (SGP), each derived from at least one alphavirus. In some embodiments of any of the aspects, the saRNAs described herein comprise at least one 5′ conserved sequence element (5′ CSE), at least one 3′ conserved sequence element (3′ CSE), and at least one subgenomic promoter (SGP), each derived from VEEV.

[0330] In some embodiments of any of the aspects, the saRNAs described herein comprise at least one 5′ untranslated region (5′ UTR) derived from at least one virus. In some embodiments of any of the aspects, the 5′ UTR is 3′ (downstream) of the SGP and 5′ (upstream) of the at least one SGP. In some embodiments of any of the aspects, the saRNAs described herein comprise at least one 5′ untranslated region (5′ UTR) derived from at least one alphavirus. In some embodiments of any of the aspects, the saRNAs described herein comprise at least one 5′ untranslated region (5′ UTR) derived from VEEV.

[0331] In some embodiments of any of the aspects, the saRNAs described herein comprise at least one 3′ untranslated region (3′ UTR) derived from at least one virus. In some embodiments of any of the aspects, the 3′ UTR is 3′ (downstream) of the at least one cargo and 5′ (upstream) of the poly-A tail. In some embodiments of any of the aspects, the saRNAs described herein comprise at least one 3′ untranslated region (3′ UTR) derived from at least one alphavirus. In some embodiments of any of the aspects, the saRNAs described herein comprise at least one 3′ untranslated region (3′ UTR) derived from VEEV.

[0332] In some embodiments of any of the aspects, the saRNAs described herein comprise at least one 5′ untranslated region (5′ UTR) and at least one 3′ untranslated region (3′ UTR) derived from at least one virus. In some embodiments of any of the aspects, the saRNAs described herein comprise at least one 5′ untranslated region (5′ UTR) and at least one 3′ untranslated region (3′ UTR) derived from at least one alphavirus. In some embodiments of any of the aspects, the saRNAs described herein comprise at least one 5′ untranslated region (5′ UTR) and at least one 3′ untranslated region (3′ UTR) derived from VEEV.

### Exemplary Cargos

[0333] The saRNAs described herein encode for and express at least one cargo of interest. In some embodiments of any of the aspects, an saRNA as described herein comprises 1, 2, 3, 4, 5, 6, 7, 8, 9, 10, or more cargos. In some embodiments of any of the aspects, the at least one cargo is 3′ (downstream) of the subgenomic promoter and 5′ untranslated region (UTR) and 5′ (upstream) of the 3′ untranslated region (UTR) and polyA tail.

[0334] In some embodiments of any of the aspects, the cargo comprises at least one cargo protein. In some embodiments of any of the aspects, the cargo comprises at least one cargo peptide. In some embodiments of any of the aspects, the cargo comprises at least one cargo protein and at least one cargo peptide. In some embodiments of any of the aspects, the cargo comprises at least two cargo proteins. Non-limiting examples of ways to separate each cargo protein include: a self-cleaving peptide domain, an internal ribosome entry site (IRES), or a separate promoter (e.g., a subgenomic promoter) between each cargo protein. The self-cleaving peptide domain can be a 2A peptide, for example, selected from the group consisting of P2A, E2A, F2A and T2A. An IRES is an RNA element that allows for translation initiation in a cap-independent manner.

[0335] In some embodiments of any of the aspects, the at least one cargo protein is viral, bacterial, protozoan, mammalian, or plant in origin. In some embodiments of any of the aspects, the at least one cargo peptide is viral, bacterial, protozoan, mammalian, or plant in origin.

[0336] In some embodiments of any of the aspects, the cargo comprises a chimeric antigen receptor (CAR). In some embodiments of any of the aspects, an saRNA as described herein encodes for and expresses a CAR is selected from the group consisting of: (a) a conventional CAR; (b) an ON-CAR; (c) an OFF-CAR system; (d) an ON/OFF-CAR; (e) an inhibitory CAR; or (f) a split, universal, programmable and reconfigurable (SUPRA) CAR system. For further details concerning such exemplary CARs, see e.g., U.S. patent Ser. Nos. 11/059,864 and 11/530,252; Li et al. Cancer Cell 40, 1-12 (2022); Li et al. Nat Med. 28(10): 2133-2144 (2022); the contents of each of which are incorporated herein by reference in their entireties.

[0337] In some embodiments of any of the aspects, an saRNA as described herein encodes for and expresses at least one conventional CAR. In some embodiments of any of the aspects, the conventional CAR comprises (e.g., from 5′ to 3′, or from N- to C-terminus): (a) an extracellular binding domain; (b) a transmembrane domain; and (c) at least one intracellular signaling domain.

[0338] In some embodiments of any of the aspects, an saRNA as described herein encodes for and expresses at least one ON-CAR. In some embodiments of any of the aspects, the ON-CAR comprises (e.g., from 5′ to 3′, or from N- to C-terminus): (a) an extracellular binding domain; (b) a transmembrane domain; (c) at least one intracellular signaling domain; and (d) a repressible protease domain that cleaves and degrades the ON-CAR in the absence of a protease inhibitor.

[0339] In some embodiments of any of the aspects, an saRNA as described herein encodes for and expresses at least one OFF-CAR system, or at least one component thereof. In some embodiments of any of the aspects, the OFF-CAR system comprises: (a) a first polypeptide comprising (e.g., from 5′ to 3′, or from N- to C-terminus): (i) an extracellular binding domain; (ii) a transmembrane domain; and (iii) a peptide domain; and (b) a second polypeptide comprising (e.g., from 5′ to 3′, or from N- to C-terminus): (i) a repressible protease domain that can bind specifically to the peptide domain in the absence of a protease inhibitor; and (ii) at least one intracellular signaling domain. In some embodiments of any of the aspects, at least one domain is moved from the first polypeptide to the second polypeptide of the OFF-CAR system, or from the second polypeptide to the first polypeptide of the OFF-CAR system. As a non-limiting example, the first polypeptide can comprise the repressible protease, and the second polypeptide can comprise the peptide domain. In some embodiments of any of the aspects, the second polypeptide further comprises a transmembrane domain.

[0340] In some embodiments of any of the aspects, the peptide domain is selected from the group consisting of: K5-66, K5-66-A, K5-66-B, K6-10, K6-10A, K6-10B K5-66-R, CP5-46, CP5-46-4D5E, CP5-46-A, CP5-46A-4D5E, Ant-CP5-46A-4D5E, and apo NS3a reader (ANR) peptides.

[0341] In some embodiments of any of the aspects, an saRNA as described herein encodes for and expresses at least one ON/OFF-CAR. In some embodiments of any of the aspects, the ON/OFF-CAR comprises (e.g., from 5′ to 3′, or from N- to C-terminus): (a) an extracellular binding domain; (b) a transmembrane domain; (c) at least one intracellular signaling domain; (d) a repressible protease domain that cleaves and degrades the ON/OFF-CAR in the absence of a protease inhibitor; and (e) a drug-inducible degron domain.

[0342] In some embodiments of any of the aspects, the repressible protease domain comprises hepatitis C virus (HCV) nonstructural protein 3 (NS3). In some embodiments of any of the aspects, the NS3 is catalytically active (e.g., ON-CAR, ON/OFF CAR). In some embodiments of any of the aspects, the NS3 is catalytically inactive (i.e., dead; e.g., OFF-CAR). For NS3, the catalytic triad can comprise His-57, Asp-81, and Ser-139. Accordingly, a catalytically inactive NS3 protease can comprise a nonsynonymous mutation at any one of His-57, Asp-81, and Ser-139, or another inactivating mutation as described herein. In some embodiments of any of the aspects, the catalytically inactive N33 protease comprises an S139A mutation.

[0343] In some embodiments of any of the aspects, a CAR as described herein comprises at least one protease cleavage site. As used herein, the term “protease cleavage site” refers to a specific sequence or sequence motif recognized by and cleaved by the repressible protease. A cleavage site for a protease includes the specific amino acid sequence or motif recognized by the protease during proteolytic cleavage and typically includes the surrounding one to six amino acids on either side of the scissile bond, which bind to the active site of the protease and are used for recognition as a substrate. In some embodiments of any of the aspects, the protease cleavage site can be any site specifically bound by and cleaved by the repressible protease. In some embodiments of any of the aspects, a CAR polypeptide as described herein (or the CAR polypeptide system collectively) comprises 1, 2, 3, 4, 5, or more protease cleavage sites. In some embodiments of any of the aspects, the CAR polypeptide comprises two protease cleavage sites. In embodiments comprising multiple protease cleavage sites, the multiple protease cleavage sites can be different individual protease cleavage sites or multiple copies of the same protease cleavage sites, or a combination of the foregoing.

[0344] As a non-limiting example, during HCV replication, the NS3-4A serine protease is responsible for the proteolytic cleavage at four junctions of the HCV polyprotein precursor: NS3/NS4A (self-cleavage), NS4A/NS4B, NS4B/NS5A, and NS5A/NS5B. Accordingly, the protease cleavage site of a CAR polypeptide as described herein can be a NS3/NS4A cleavage site, a NS4A/NS4B cleavage site, a NS4B/NS5A cleavage site, or a NS5A/NS5B cleavage site.

[0345] In some embodiments of any of the aspects, a CAR polypeptide as described herein is in combination with a protease inhibitor. As used herein, “in combination with” refers to two or more substances being present in the same formulation in any molecular or physical arrangement, e.g., in an admixture, in a solution, in a mixture, in a suspension, in a colloid, in an emulsion. The formulation can be a homogeneous or heterogeneous mixture. In some embodiments of any of the aspects, the active compound(s) can be comprised by a superstructure, e.g., nanoparticles, liposomes, vectors, cells, scaffolds, or the like, said superstructure is which in solution, mixture, admixture, suspension, etc., with the CAR polypeptide or CAR polypeptide system. In some embodiments of any of the aspects, the CAR polypeptide is bound to a protease inhibitor bound to the repressible protease. In some embodiments of any of the aspects, the CAR polypeptide is bound specifically to a protease inhibitor bound to the repressible protease.

[0346] In some embodiments of any of the aspects, the CAR polypeptide is in combination with 1, 2, 3, 4, 5, or more protease inhibitors. In some embodiments of any of the aspects, the CAR polypeptide is in combination with one protease inhibitor. In embodiments comprising multiple protease inhibitors, the multiple protease inhibitors can be different individual protease inhibitors or multiple copies of the same protease inhibitor, or a combination of the foregoing.

[0347] In some embodiments of any of the aspects, the protease inhibitor is grazoprevir (abbreviated as GZV or GZP; see e.g., PubChem CID: 44603531). In some embodiments of any of the aspects, the protease inhibitor is danoprevir (DNV; see e.g., PubChem CID: 11285588). In some embodiments of any of the aspects, the protease inhibitor is an approved NS3 protease inhibitor, such as but not limited to grazoprevir, danoprevir, simeprevir, asunaprevir, ciluprevir, boceprevir, sovaprevir, paritaprevir, ombitasvir, paritaprevir, ritonavir, dasabuvir, and telaprevir. Additional non-limiting examples of NS3 protease inhibitors are listed in McCauley and Rudd, Hepatitis C virus NS3/4a protease inhibitors, Current Opinion in Pharmacology 2016, 30:84-92; the content of which is incorporated herein by reference in its entirety.

[0348] In some embodiments of any of the aspects, the drug-inducible degron domain comprises an IKAROS family zinc finger 3 (IKZF3) domain capable of being bound and activated to degrade the CAR by the drug lenalidomide or pomalidomide.

[0349] In some embodiments of any of the aspects, an saRNA as described herein encodes for and expresses at least one inhibitory CAR. In some embodiments of any of the aspects, the inhibitory CAR comprises (e.g., from 5′ to 3′, or from N- to C-terminus): (a) an extracellular binding domain; (b) a transmembrane domain; and (c) an inhibitory domain.

[0350] In some embodiments of any of the aspects, the inhibitory domain comprises a Killer Cell Inhibitory Receptor (KIR) domain. In some embodiments of any of the aspects, the inhibitory domain comprises at least one immunoreceptor tyrosine-based inhibitory motifs (ITIMs). In some embodiments, an ITIM comprises S/I/V/LxYxxI/V/L, SEQ ID NO: 20, where x is any amino acid, Y is a tyrosine residue that can be phosphorylated, S is the amino acid Serine, I is the amino acid Isoleucine, and V is the amino acid Valine). In some embodiments of any of the aspects, the inhibitory domain comprises an inhibitory domain (e.g., an ITIM-comprising domain) from FcγRIIB, CTLA-4, PD-1, BTLA, CD72, NKG2A, CD31, SIGLEC, CD66, ILT, or LIR.

[0351] In some embodiments of any of the aspects, an saRNA as described herein encodes for and expresses at least one SUPRA CAR system or at least one component thereof. In some embodiments of any of the aspects, the SUPRA CAR system comprises: (a) a first polypeptide comprising (e.g., from 5′ to 3′, or from N- to C-terminus): (i) an extracellular binding domain; and (ii) a first member of an extracellular protein interaction domain; and (b) a second polypeptide comprising (e.g., from 5′ to 3′, or from N- to C-terminus): (i) a second member of the extracellular protein interaction domain that can bind specifically with the first member of the extracellular protein interaction domain of the first polypeptide; (ii) a transmembrane domain; and (iii) at least one intracellular signaling domain.

[0352] In some embodiments of any of the aspects, at least one domain is moved from the first polypeptide to the second polypeptide of the SUPRA-CAR system, or from the second polypeptide to the first polypeptide of the SUPRA-CAR system. As a non-limiting example, the first polypeptide can comprise the second member of the extracellular protein interaction domain, and the second polypeptide can comprise the first member of the extracellular protein interaction domain. In some embodiments of any of the aspects, the first and second members of the extracellular protein interaction domain comprise a leucine zipper pair.

[0353] In some embodiments of any of the aspects, at least intracellular signaling domain in a CAR as described herein is selected from the group consisting of: TCRC; FcRy; FcRp; CD3zeta; CD3y; CD35; CD3s; CD3C; CD22; CD79a; CD79b; CD66d; CARD11; CD2; CD7; CD27; CD28; CD30; CD40; CD54 (ICAM); CD83; CD134 (OX40); CD137 (4-1BB); CD150 (SLAMF1); CD152 (CTLA4); CD223 (LAG3); CD270 (HVEM); CD273 (PD-L2); CD274 (PD-L1); CD278 (ICOS); DAP10; LAT; KD2C SLP76; TRIM; ZAP70; and 41BB. In some embodiments of any of the aspects, at least intracellular signaling domain in a CAR as described herein is derived from CD28 or CD3zeta.

[0354] In some embodiments of any of the aspects, the cargo comprises a CAR and at least one expression-enhancing protein. In some embodiments of any of the aspects, the expression enhancing protein is B18R. In some embodiments of any of the aspects, the expression enhancing protein is E3L.

[0355] In some embodiments of any of the aspects, the extracellular binding domain of a CAR as described herein comprises an antigen binding domain from an antibody. In some embodiments of any of the aspects, the extracellular binding domain of a CAR as described herein comprises a single-chain variable fragment (scFv).

[0356] In some embodiments of any of the aspects, the cargo comprises at least one domain responsive to an external input. In some embodiments of any of the aspects, the cargo comprises an antibody or fragment thereof. In some embodiments of any of the aspects, the antibody is a bispecific antibody. In some embodiments of any of the aspects, the cargo comprises a bispecific T cell engager (BiTE). In some embodiments of any of the aspects, a BiTE is a fusion protein comprising the extracellular binding domain of two antibodies. For example, one arm of the BiTE comprises an extracellular binding domain specific for a protein found on the surface of cytotoxic T cells (e.g., CD3), and the other arm of the BiTE comprises an extracellular binding domain specific for a specific protein found primarily on tumor cells (e.g., HER2, or other antigens as described herein). When both targets are engaged, the BiTE molecule forms a bridge between a cytotoxic T cell and the tumor cell, which permits the T cell to recognize the tumor cell and fight it through an infusion of toxic molecules.

[0357] In some embodiments of any of the aspects, the cargo comprises an extracellular domain that specifically binds to an antigen of interest. In some embodiments of any of the aspects, the antigen of interest is specific to and/or upregulated on certain cancer cells. Non-limiting examples of the antigen of interest for the cargo protein (e.g., CAR, antibody, BiTE, etc.) include: CD19, CD22, CD30, b-cell maturation antigen (BCMA), disialoganglioside GD2, human estrogen receptor 2 (HER2), G protein-coupled receptor 87 (GPR87), Fibroblast Activator Protein (FAP), CD20, receptor tyrosine kinase-like orphan receptor 1 (ROR1), carcinoembryonic antigen (CEA), mesothelin (MSLN), prostate-specific membrane antigen (PSMA), epidermal growth factor receptor variant III (EGFRvIII), Interleukin 13 receptor alpha 2 (IL13Rα2), and natural killer group 2 member D (NKG2D).

[0358] Additional non-limiting examples of tumor antigens that can be targeted include EphA2, HER2, AXL, GD2, Glypican-3, 5T4, 8H9, αvβ6 integrin, BCMA, B7-H3, B7-H6, CAIX, CA9, CD19, CD20, CD22, kappa light chain, CD30, CD33, CD38, CD44, CD44v6, CD44v7/8, CD70, CD123, CD138, CD171, CEA, CSPG4, EGFR, EGFRvIII, EGP2, EGP40, EPCAM, ERBB3, ERBB4, ErbB3/4, FAP, FAR, FBP, fetal AchR, Folate Receptor a, GD2, GD3, HLA-AI MAGE A1, HLA-A2, IL1 1Ra, IL13Rα2, KDR, Lambda, Lewis-Y, MCSP, Mesothelin, Mucl, Mucl6, NCAM, NKG2D ligands, NY-ESO-1, PRAME, PSCA, PSC1, PSMA, ROR1, SURVIVIN, TAG72, TEM1, TEM8, VEGRR2, carcinoembryonic antigen, HMW-MAA, and VEGF receptors. Other exemplary antigens that can be targeted are antigens that are present with in the extracellular matrix of tumors, such as oncofetal variants of fibronectin, tenascin, or necrotic regions of tumors.

[0359] Additional tumor-selective molecules that can be targeted include any membrane protein or biomarker that is expressed or overexpressed in tumor cells including, but not limited to, integrins (e.g., integrin αvβ3, α5β1), EGF Receptor Family (e.g., EGFR2, Erbb2/HER2/neu, Erbb3, Erbb4), proteoglycans (e.g., heparan sulfate proteoglycans), disialogangliosides (e.g., GD2, GD3), B7-H3 (aka CD276), cancer antigen 125 (CA-125), epithelial cell adhesion molecule (EpCAM), vascular endothelial growth factor receptors 1 and 2 (VEGFR-1, VEGFR-2), CD52, carcinoembryonic antigen (CEA), tumor associated glycoproteins (e.g., TAG-72), cluster of differentiation 19 (CD19), CD20, CD22, CD30, CD33, CD40, CD44, CD74, CD152, mucin 1 (MUC1), tumor necrosis factor receptors (e.g., TRAIL-R2), insulin-like growth factor receptors, folate receptor a, transmembrane glycoprotein NMB (GPNMB), C-C chemokine receptors (e.g., CCR4), prostate specific membrane antigen (PSMA), recepteur d'origine nantais (RON) receptor, cytotoxic T-lymphocyte antigen 4 (CTLA4), and other tumor specific receptors or antigens.

[0360] Non-limiting examples of tumor antigens include the following: differentiation antigens such as MART-1/MelanA (MART-I), gp100 (Pmel 17), tyrosinase, TRP-1, TRP-2 and tumor-specific multilineage antigens such as MAGE-1, MAGE-3, BAGE, GAGE-1, GAGE-2, p15; overexpressed embryonic antigens such as CEA; overexpressed oncogenes and mutated tumor-suppressor genes such as p53, Ras, HER-2/neu; unique tumor antigens resulting from chromosomal translocations; such as BCR-ABL, E2A-PRL, H4-RET, IGH-IGK, MYL-RAR; and viral antigens, such as the Epstein Barr virus antigens EBVA and the human papillomavirus (HPV) antigens E6 and E7. Other large, protein-based antigens include TSP-180, MAGE-4, MAGE-5, MAGE-6, RAGE, NY-ESO, p185erbB2, p180erbB-3, c-met, nm-23H1, PSA, TAG-72, CA 19-9, CA 72-4, CAM 17.1, NuMa, K-ras, beta-Catenin, CDK4, Mum-1, p 15, p 16, 43-9F, 5T4, 791Tgp72, alpha-fetoprotein, beta-HCG, BCA225, BTAA, CA 125, CA 15-3CA 27.29BCAA, CA 195, CA 242, CA-50, CAM43, CD68P1, CO-029, FGF-5, G250, Ga733EpCAM, HTgp-175, M344, MA-50, MG7-Ag, MOV18, NB/70K, NY-CO-1, RCAS1, SDCCAG16, TA-90Mac-2 binding protein\cyclophilin C-associated protein, TAAL6, TAG72, TLP, and TPS.

[0361] In some embodiments of any of the aspects, the tumor antigen is a tumor antigen described in International Application PCT/US2015/020606 or US Patent Applications US20170209492 or US20170335281, the contents of each of which are herein incorporated by reference in their entireties. In some embodiments, the tumor antigen is chosen from one or more of: CD19; CD123; CD22; CD30; CD171; CS-1 (also referred to as CD2 subset 1, CRACC, SLAMF7, CD319, and 19A24); C-type lectin-like molecule-1 (CLL-1 or CLECL1); CD33; epidermal growth factor receptor variant III (EGFRvIII); ganglioside G2 (GD2); ganglioside GD3 (aNeu5Ac(2-8)aNeu5Ac(2-3)bDGalp(1-4)bDG1cp(1-1)Cer); TNF receptor family member B cell maturation (BCMA); Tn antigen ((Tn Ag) or (GalNAcα-Ser/Thr)); prostate-specific membrane antigen (PSMA); Receptor tyrosine kinase-like orphan receptor 1 (ROR1); Fms-Like Tyrosine Kinase 3 (FLT3); Tumor-associated glycoprotein 72 (TAG72); CD38; CD44v6; Carcinoembryonic antigen (CEA); Epithelial cell adhesion molecule (EPCAM); B7H3 (CD276); KIT (CD117); Interleukin-13 receptor subunit alpha-2 (IL-13Ra2 or CD213A2); Mesothelin; Interleukin 11 receptor alpha (IL-11Ra); prostate stem cell antigen (PSCA); Protease Serine 21 (Testisin or PRSS21); vascular endothelial growth factor receptor 2 (VEGFR2); Lewis(Y) antigen; CD24; Platelet-derived growth factor receptor beta (PDGFR-beta); Stage-specific embryonic antigen-4 (SSEA-4); CD20; Folate receptor alpha; Receptor tyrosine-protein kinase ERBB2 (Her2/neu); Mucin 1, cell surface associated (MUC1); epidermal growth factor receptor (EGFR); neural cell adhesion molecule (NCAM); Prostase; prostatic acid phosphatase (PAP); elongation factor 2 mutated (ELF2M); Ephrin B2; fibroblast activation protein alpha (FAP); insulin-like growth factor 1 receptor (IGF-I receptor), carbonic anhydrase IX (CAIX); Proteasome (Prosome, Macropain) Subunit, Beta Type, 9 (LMP2); glycoprotein 100 (gp100); oncogene fusion protein consisting of breakpoint cluster region (BCR) and Abelson murine leukemia viral oncogene homolog 1 (Ab1) (bcr-ab1); tyrosinase; ephrin type-A receptor 2 (EphA2); Fucosyl GM1; sialyl Lewis adhesion molecule (sLe); ganglioside GM3 (aNeu5Ac(2-3)bDGalp(1-4)bDGlcp(1-1)Cer); transglutaminase 5 (TGS5); high molecular weight-melanoma-associated antigen (HMWMAA); o-acetyl-GD2 ganglioside (OAcGD2); Folate receptor beta; tumor endothelial marker 1 (TEM1/CD248); tumor endothelial marker 7-related (TEM7R); claudin 6 (CLDN6); thyroid stimulating hormone receptor (TSHR); G protein-coupled receptor class C group 5, member D (GPRC5D); chromosome X open reading frame 61 (CXORF61); CD97; CD179a; anaplastic lymphoma kinase (ALK); Polysialic acid; placenta-specific 1 (PLAC1); hexasaccharide portion of globoH glycoceramide (GloboH); mammary gland differentiation antigen (NY-BR-1); uroplakin 2 (UPK2); Hepatitis A virus cellular receptor 1 (HAVCR1); adrenoceptor beta 3 (ADRB3); pannexin 3 (PANX3); G protein-coupled receptor 20 (GPR20); lymphocyte antigen 6 complex, locus K 9 (LY6K); Olfactory receptor 51E2 (OR51E2); TCR Gamma Alternate Reading Frame Protein (TARP); Wilms tumor protein (WT1); Cancer/testis antigen 1 (NY-ESO-1); Cancer/testis antigen 2 (LAGE-1a); Melanoma-associated antigen 1 (MAGE-A1); ETS translocation-variant gene 6, located on chromosome 12p (ETV6-AML); sperm protein 17 (SPA17); X Antigen Family, Member 1A (XAGE1); angiopoietin-binding cell surface receptor 2 (Tie 2); melanoma cancer testis antigen-1 (MAD-CT-1); melanoma cancer testis antigen-2 (MAD-CT-2); Fos-related antigen 1; tumor protein p53 (p53); p53 mutant; prostein; surviving; telomerase; prostate carcinoma tumor antigen-1 (PCTA-1 or Galectin 8), melanoma antigen recognized by T cells 1 (MelanA or MARTI); Rat sarcoma (Ras) mutant; human Telomerase reverse transcriptase (hTERT); sarcoma translocation breakpoints; melanoma inhibitor of apoptosis (ML-IAP); ERG (transmembrane protease, serine 2 (TMPRSS2) ETS fusion gene); N-Acetyl glucosaminyl-transferase V (NA17); paired box protein Pax-3 (PAX3); Androgen receptor; Cyclin B1; v-myc avian myelocytomatosis viral oncogene neuroblastoma derived homolog (MYCN); Ras Homolog Family Member C (RhoC); Tyrosinase-related protein 2 (TRP-2); Cytochrome P450 1B1 (CYP1B1); CCCTC-Binding Factor (Zinc Finger Protein)-Like (BORIS or Brother of the Regulator of Imprinted Sites), Squamous Cell Carcinoma Antigen Recognized By T Cells 3 (SART3); Paired box protein Pax-5 (PAXS); proacrosin binding protein sp32 (OY-TES1); lymphocyte-specific protein tyrosine kinase (LCK); A kinase anchor protein 4 (AKAP-4); synovial sarcoma, X breakpoint 2 (SSX2); Receptor for Advanced Glycation Endproducts (RAGE-1); renal ubiquitous 1 (RU1); renal ubiquitous 2 (RU2); legumain; human papilloma virus E6 (HPV E6); human papilloma virus E7 (HPV E7); intestinal carboxyl esterase; heat shock protein 70-2 mutated (mut hsp70-2); CD79a; CD79b; CD72; Leukocyte-associated immunoglobulin-like receptor 1 (LAIR1); Fc fragment of IgA receptor (FCAR or CD89); Leukocyte immunoglobulin-like receptor subfamily A member 2 (LILRA2); CD300 molecule-like family member f (CD300LF); C-type lectin domain family 12 member A (CLEC12A); bone marrow stromal cell antigen 2 (BST2); EGF-like module-containing mucin-like hormone receptor-like 2 (EMR2); lymphocyte antigen 75 (LY75); Glypican-3 (GPC3); Fc receptor-like 5 (FCRL5); and immunoglobulin lambda-like polypeptide 1 (IGLL1). In some embodiments, the tumor antigen is GFRa4 (see e.g., Spinasanta, “The Endocrine Society's 97th Annual Meeting & Expo: Targeted Therapies in Medullary Thyroid Cancer” Mar. 13, 2015).

[0362] In some embodiments of any of the aspects, the extracellular binding domain comprises an anti-Her2 antibody. HER2 (human epidermal growth factor receptor 2) is a gene that plays a role in the development of breast cancer. Cancers that can be HER2 positive include breast, bladder, pancreatic, ovarian, and stomach cancers. Non-limiting examples of anti-Her2 antibodies include G98A, C6.5, ML39, H3B1 (e.g., SEQ ID NOs: 8, 41), scFv800E6, and trastuzumab. See e.g., Rudnick et al., Cancer Res. 2011 Mar. 15, 71(6): 2250-2259; Sommaruga et al. Appl Microbiol Biotechnol. 2011 August, 91(3):613-21; US Patents U.S. Pat. Nos. 5,977,322, 8,580,263, 8,703,427, 8,927,694, U.S. Ser. No. 10/188,742, U.S. Ser. No. 10/239,951, the contents of each of which are incorporated herein by reference in their entireties.

[0363] In some embodiments of any of the aspects, the extracellular binding domain comprises an anti-Ax1 antibody. AXL overexpression has been demonstrated in various cancer types, e.g., breast (Meric et al., Clin. Cancer Res. 8: 361-367, 2002; Berclaz et al., Ann. Oncol. 12: 819-824, 2001), colon (Chen et al., Int. J. Cancer 83: 579-584, 1999; Craven et al., Int. J. Cancer 60: 791-797, 1995), prostate (Jacob et al., Cancer Detect. Prey. 23: 325-332, 1999), lung (Wimmel et al., Eur J Cancer 37: 2264-2274, 2001), gastric (Wu et al., Anticancer Res 22: 1071-1078, 2002), ovarian (Sun et al., Oncology 66: 450-457, 2004), endometrial (Sun et al., Ann. Oncol. 14: 898-906, 2003), renal (Chung et al., DNA Cell Biol. 22: 533-540, 2003), hepatocellular (Tsou et al., Genomics 50:331-340, 1998), thyroid (Ito et al., Thyroid 12:971-975, 2002; Ito et al., Thyroid 9: 563-567, 1999), and esophageal carcinoma (Nemoto et al., 1997), furthermore in CML (Janssen et al., A novel putative tyrosine kinase receptor with oncogenic potential. Oncogene, 6: 2113-2120, 1991; Braunger et al., Oncogene 14:2619-2631 1997; O'Bryan et al., Mol Cell Biol 11:5016-5031, 1991), AML (Rochlitz et al., Leukemia 13: 1352-1358, 1999), osteosarcoma (Nakano et al., J. Biol. Chem. 270:5702-5705, 2003) melanoma (van Ginkel et al., Cancer Res 64:128-134, 2004) and in head and neck squamous cell carcinoma (Green et al., Br J. Cancer. 2006 94:1446-5, 2006). Moreover, AXL has been identified as a metastasis-associated gene that is upregulated in aggressive breast cancer cell lines compared to non-invasive cells. Non-limiting examples of anti-Ax1 antibodies include 11B7, 11D5, 10D12, and h #11B7-T18. See e.g., International Patent Application WO2010130751 or US Patent U.S. Pat. No. 8,841,424, the contents of each of which are incorporated herein by reference in their entireties.

[0364] In some embodiments of any of the aspects, the extracellular binding domain comprises an anti-CD19 antibody. Since CD19 is a marker of B cells, the protein has been used to diagnose cancers that arise from this type of cell—notably B cell lymphomas, acute lymphoblastic leukemia (ALL), and chronic lymphocytic leukemia (CLL). The majority of B cell malignancies express normal to high levels of CD19. Non-limiting examples of anti-CD19 antibodies include A3B1, FMC63, FMC63-28Z, SEQ ID NO: 94; see e.g., U.S. Pat. Nos. 10,221,245, 8,906,682, 10,421,810, the contents of each of which are incorporated herein by reference in their entireties.

[0365] In some embodiments of any of the aspects, the cargo comprises a ligand, a cell surface receptor, a transcription factor, a cytokine, a chemokine, an enzyme, and/or an antibody. In some embodiments of any of the aspects, the cargo comprises least one ligand. In some embodiments of any of the aspects, the cargo comprises at least one cell surface receptor. In some embodiments of any of the aspects, the cargo comprises least one transcription factor. In some embodiments of any of the aspects, the cargo comprises least one cytokine. In some embodiments of any of the aspects, the cargo comprises least one chemokine. In some embodiments of any of the aspects, the cargo comprises least one enzyme. In some embodiments of any of the aspects, the cargo comprises least one antibody.

[0366] In some embodiments of any of the aspects, the cargo comprises at least one non-coding RNA. For example, the non-coding RNA can be selected from the group consisting of short interfering RNA (siRNA), small hairpin RNA (shRNA), and microRNA. In some embodiments of any of the aspects, the cargo comprises at least one siRNA. In some embodiments of any of the aspects, the cargo comprises at least one shRNA. In some embodiments of any of the aspects, the cargo comprises at least one microRNA.

[0367] In some embodiments of any of the aspects, the cargo comprises at least one vaccine-associated antigen. As used herein, the term “vaccine-associated antigen” refers to a foreign (e.g., microbial) substance that can illicit an immune response in a subject administered the antigen, e.g., as a vaccination against the foreign substance (e.g., microbe).

[0368] In some embodiments of any of the aspects, the vaccine-associated antigen comprises at least one protein encoded by a genome of a virus. Non-limiting examples of viruses expressing such an antigen include: Rift valley fever, Crimean-Congo haemorrhagic fever, Lassa fever, Chikungunya Virus (CHIKV), Nipah Virus (NiV), respiratory syncytial virus (RSV), Ebola virus, Marburg virus, West Nile virus, Venezuela equine encephalitis, yellow fever virus, Japanese encephalitis virus, western equine encephalitis virus, eastern equine encephalitis, cytomegalovirus (CMV), human immunodeficiency virus (HIV), influenza virus, Zika virus, middle eastern respiratory syndrome coronavirus (MERS-CoV), severe acute respiratory syndrome coronavirus (SARS-CoV), severe acute respiratory syndrome coronavirus 2 (SARS-CoV-2), human papillomavirus (HPV), herpes virus, rotavirus, varicella-zoster virus (VZV), dengue virus, hepatitis A virus, hepatitis B virus, rubella virus, poliovirus, and rabies virus.

[0369] In some embodiments of any of the aspects, the vaccine-associated antigen comprises an antigen selected from the group consisting of: influenza virus hemagglutinin, Severe acute respiratory syndrome coronavirus 2 (SARS-CoV-2) Spike protein, and Human respiratory syncytial virus (RSV) Fusion glycoprotein.

[0370] In some embodiments of any of the aspects, the vaccine-associated antigen comprises one of SEQ ID NOs: 13-16, 22 or an amino acid sequence that is at least about 75%, at least about 80%, at least about 85%, at least about 90%, at least about 91%, at least about 92%, at least about 93%, at least about 94%, at least about 95%, at least about 96%, at least about 97%, at least at least about 98%, at least about 99%, or 100%, identical to one of SEQ ID NOs: 13-16, 22. In some embodiments of any of the aspects, the vaccine-associated antigen is encoded by nucleotides 7599-11384 of SEQ ID NO: 21 or a nucleic acid sequence that is at least about 75%, at least about 80%, at least about 85%, at least about 90%, at least about 91%, at least about 92%, at least about 93%, at least about 94%, at least about 95%, at least about 96%, at least about 97%, at least at least about 98%, at least about 99%, or 100%, identical to nucleotides 7599-11384 of SEQ ID NO: 21. In some embodiments, the vaccine-associated antigen encoded and expressed by the saRNA maintains the same function of the wild-type viral protein (e.g., viral entry into a cell). In some embodiments, the vaccine-associated antigen encoded and expressed by the saRNA has an attenuated or inactive function compared to the function of the wild-type viral protein.

[0371] In some embodiments of any of the aspects, the cargo comprises at least one transcription factor. In some embodiments of any of the aspects, the transcription factor is a stem cell transcription factor. In some embodiments of any of the aspects, the transcription factor is selected from the group consisting of Octamer-Binding Transcription Factor 3 (Oct3, Oct4), Sex-Determining Region Y (SRY)-Box Transcription Factor 2 (Sox2), Kruppel-Like Factor 4 (Klf4), and cellular myelocytomatosis oncogene (c-Myc).

[0372] In some embodiments of any of the aspects, the cargo comprises at least one growth factor and/or cytokine. In some embodiments of any of the aspects, the growth factor or cytokine is selected from the list consisting of platelet-derived growth factor (PDGF), erythropoietin (EPO), vascular endothelial growth factor (VEGF), transforming growth factor-β1 (TGF-β1), fibroblast growth factor (FGF), human relaxin-2 (RLX2), alpha-melanocyte-stimulating hormone (alpha-MSH), insulin-like growth factor-I (IGF-I), epidermal growth factor (EGF), nerve growth factor (NGF), granulocyte-monocyte colony-stimulating factor (GMCSF), Thrombopoietin (TPO), Bone morphogenic protein (BMP), hepatocyte growth factor (HGF), growth/differentiation factor (GDF), a Neurotrophin, migration stimulating factor (MSF), and sarcoma growth factor (SGF).

[0373] In some embodiments of any of the aspects, the cargo comprises one or both Pappalysin-A1 (PAPPA1) and Pappalysin-A2 (PAPPA2).

[0374] In some embodiments of any of the aspects, the cargo comprises at least one interleukin. In some embodiments of any of the aspects, the cargo comprises at least one cognate receptor of an interleukin. In some embodiments of any of the aspects, the cargo comprises at least one receptor sub-units for an interleukin. In some embodiments of any of the aspects, the interleukin is selected from the group consisting of IL-2, IL-4, IL-7, IL-10, IL-12, IL-13, and IL-15.

[0375] In some embodiments of any of the aspects, the cargo comprises at least one enzyme with antioxidant activity. In some embodiments of any of the aspects, the enzyme is selected from the group consisting of phospholipid hydroperoxide glutathione peroxidase, superoxide dismutase-1, superoxide dismutase-2, Bruton's tyrosine kinase, adenosine deaminase, and ecto-nucleoside triphosphate diphosphydrolase.

[0376] In some embodiments of any of the aspects, the cargo comprises glucagon-like peptide-1 (GLP-1) or a fragment thereof. As a non-limiting example, a bioactive form of glucagon-like peptide-1 (GLP-1) comprises amino acids 7-37 of GLP-1: HAEGTFTSDVSSYLEGQAAKEFIAWLVRGRG (SEQ ID NO: 17). In some embodiments of any of the aspects, GLP-1 comprises SEQ ID NO: 17 or an amino acid sequence that is at least about 75%, at least about 80%, at least about 85%, at least about 90%, at least about 91%, at least about 92%, at least about 93%, at least about 94%, at least about 95%, at least about 96%, at least about 97%, at least at least about 98%, at least about 99%, or 100%, identical SEQ ID NO: 17, that maintains its function (e.g., stimulate insulin secretion and/or inhibit glucagon secretion).

[0377] In some embodiments of any of the aspects, the cargo further comprises an endogenous insulin secretion signal (MALWMRLLPLLALLALWGPDPAAA, SEQ ID NO: 18) and/or a furin cleavage site (RGRR, SEQ ID NO: 19). In some embodiments of any of the aspects, an saRNA comprising glucagon-like peptide-1 (GLP-1) or a fragment thereof can be used to treat diabetes and/or obesity.

[0378] In some embodiments of any of the aspects, at least one cargo is inserted between the AflII and NdeI cut sites of SEQ ID NO: 2. In some embodiments of any of the aspects, at least one cargo is inserted between nucleotides 7627 and 7628 of SEQ ID NO: 2. In some embodiments of any of the aspects, nucleotides 7634 to 8347 of SEQ ID NO: 5, nucleotides 7617 to 8330 of SEQ ID NO: 6, or nucleotides 7617 to 8330 of SEQ ID NO: 7, each corresponding to mCherry, is replaced with at least one cargo of interest, as described further herein.

[0379] In some embodiments of any of the aspects, at least one cargo comprises a detectable marker or a reporter molecule, including but not limited to a fluorescent protein or a detectable tag (e.g., c-Myc, HA, VSV-G, HSV, FLAG, V5, HIS, or biotin). In some embodiments of any of the aspects, an saRNA as described herein, especially those that are administered to a subject or those that are part of a pharmaceutical composition, do not encode for or comprise detectable markers that are immunogenic. In some embodiments of any of the aspects, an saRNA as described herein do not comprise or encode for GFP, mCherry, HA1, or any other immunogenic markers. In some embodiments of any of the aspects, an saRNA described herein that comprises a detectable marker can have the detectable marker removed at a later time, e.g., a removable (e.g., cleavable) detectable marker. In some embodiments of any of the aspects, an saRNA described herein that comprises a detectable marker can have the detectable marker replaced with a different detectable marker, as known in the art or described herein, e.g., a replaceable (e.g., interchangeable) detectable marker.

### PolyA Tails

[0380] In multiple aspects, described herein are saRNAs comprising a polyA tail, which is found on the 3′ end of the saRNA molecule. In some embodiments of any of the aspects, the polyA tail is derived from at least one virus. In some embodiments of any of the aspects, the polyA tail is derived from at least one alphavirus. In some embodiments of any of the aspects, the polyA tail is derived from VEEV.

[0381] A poly-A (polyadenylation) tail is a long chain of adenine nucleotides that is added to an RNA molecule during RNA processing to increase the stability of the molecule. In some embodiments, the poly-A tail can be between 20 and 30, between 30 and 50, between 50 and 100, or between 100 and 250 residues long. The poly-A tail makes the RNA molecule more stable and prevents its degradation. Additionally, the poly-A tail allows the mature RNA molecule to be exported from the nucleus and/or translated into a protein by ribosomes in the cytoplasm.

[0382] In some embodiments of any of the aspects, the saRNA comprises a polyA signal (e.g., AAUAAA) that leads to cleaving of the 3′ end of the RNA to free a 3′ hydroxyl and recruitment of a poly-A polymerase to add a chain of adenine nucleotides to the RNA. In some embodiments of any of the aspects, the polyA tail is encoded in the saRNA, such as by using a polyT sequence at the 5′ end of a negative-strand template for the saRNA.

### Nucleic Acids and Vectors

[0383] The saRNAs described herein can be encoded and/or expressed by nucleic acids and/or vectors. Accordingly, in one aspect described herein is a nucleic acid encoding or comprising an saRNA as described herein. In another aspect described herein is a vector encoding or comprising an saRNA as described herein.

[0384] In some embodiments of any of the aspects, the nucleic acid encoding or comprising an saRNA as described herein comprises DNA. In some embodiments of any of the aspects, the nucleic acid encoding or comprising an saRNA as described herein consists essentially of DNA. In some embodiments of any of the aspects, the nucleic acid encoding or comprising an saRNA as described herein consists of DNA.

[0385] In some embodiments of any of the aspects, a DNA molecule encoding an saRNA as described herein comprises one of SEQ ID NOs: 2 or 5 or a nucleic acid sequence that is at least about 75%, at least about 80%, at least about 85%, at least about 90%, at least about 91%, at least about 92%, at least about 93%, at least about 94%, at least about 95%, at least about 96%, at least about 97%, at least at least about 98%, at least about 99%, or 100%, identical to one of SEQ ID NOs: 2 or 5 that maintains the same function (e.g., self-replication), or a codon-optimized version thereof.

[0386] In some embodiments of any of the aspects, a DNA molecule encoding an saRNA as described herein comprises at least one regulatory sequence upstream of the encoded saRNA. In some embodiments of any of the aspects, a DNA molecule encoding an saRNA as described herein comprises a promoter for transcription of the saRNA using an RNA polymerase. In some embodiments of any of the aspects, a DNA molecule encoding an saRNA as described herein comprises a T7 promoter (see e.g., SEQ ID NO: 3, SEQ ID NO: 8, SEQ ID NO: 12; see e.g., nucleotides 1-17 of SEQ ID: 2, nucleotides 1-17 of SEQ ID: 5).

[0387] When the nucleic acid molecule that encodes any of the saRNAs described herein is expressed in a cell, a variety of transcription control sequences (e.g., promoter/enhancer sequences) can be used to direct its expression. The promoter can be a native promoter, e.g., the promoter of the at least one cargo protein in its endogenous context, which provides normal regulation of expression of the cargo protein. In some embodiments the promoter can be constitutive, i.e., the promoter is unregulated allowing for continual transcription of the saRNA and its associated cargo(s). A variety of conditional promoters also can be used, such as promoters controlled by the presence or absence of a molecule.

[0388] The precise nature of the regulatory sequences needed for expression can vary between species or cell types, but in general can include, as necessary, 5′ non-transcribed and 5′ non-translated sequences involved with the initiation of transcription and translation respectively, such as a TATA box, capping sequence, CAAT sequence, and the like. In particular, such 5′ non-transcribed regulatory sequences can include a promoter region which includes a promoter sequence for transcriptional control of the encoded saRNA. Regulatory sequences can also include enhancer sequences or upstream activator sequences as desired.

[0389] As used herein, an saRNA-encoding sequence and regulatory sequences are said to be “operably” joined when they are covalently linked in such a way as to place the expression or transcription of the saRNA-encoding sequence under the influence or control of the regulatory sequences. If it is desired that at least one cargo encoded in the saRNA be translated into a functional protein, two DNA sequences are said to be operably joined if induction of a promoter in the 5′ regulatory sequences results in the transcription of the saRNA and if the nature of the linkage between the two DNA sequences does not (1) result in the introduction of a frame-shift mutation, (2) interfere with the ability of the promoter region to direct the transcription of the saRNA, or (3) interfere with the ability of the at least one cargo encoded in the saRNA to be translated into a protein.

[0390] A nucleic acid molecule that encodes an saRNA as described herein can be introduced into a cell or cells using methods and techniques that are standard in the art. For example, nucleic acid molecules can be introduced by standard protocols such as transformation including chemical transformation and electroporation, transduction, particle bombardment, etc. Expressing the nucleic acid molecule encoding an saRNA as described herein can also be accomplished by integrating the nucleic acid molecule into the genome.

[0391] In some embodiments, one or more of the saRNAs described herein is expressed in a recombinant expression vector or plasmid. FIGS. 81-91 contain schematics of exemplary vectors used for in vitro transcription of exemplary saRNAs. As used herein, the term “vector” refers to a polynucleotide sequence suitable for transferring nucleic acids (e.g., DNA encoding saRNAs as described herein) into a host cell. The vector can encompass any genetic element that is capable of replication when associated with the proper control elements and that can transfer nucleic acid sequences to cells. The term “vector” includes a plasmid, a cloning vector, an expression vector, naked DNA, a mini-chromosome, a chromosome, a transposon, a cosmid, a virus, virion, phage, and the like. See, for example, U.S. Pat. Nos. 4,980,285; 5,631,150; 5,707,828; 5,759,828; 5,888,783 and, 5,919,670, and, Sambrook et al, Molecular Cloning: A Laboratory Manual, 2nd Ed., Cold Spring Harbor Press (1989). One type of vector is a “plasmid,” which refers to a circular double stranded DNA loop into which additional DNA segments are ligated. Another type of vector is a viral vector, wherein additional DNA segments are ligated into the viral genome. Certain vectors are capable of autonomous replication in a host cell into which they are introduced (e.g., bacterial vectors having a bacterial origin of replication and episomal mammalian vectors). Moreover, certain vectors are capable of directing the expression of genes to which they are operatively linked. Such vectors are referred to herein as “expression vectors”. In general, expression vectors of utility in recombinant DNA techniques are often in the form of plasmids. In the present specification, “plasmid” and “vector” is used interchangeably as the plasmid is the most commonly used form of vector. However, the invention is intended to include such other forms of expression vectors, such as viral vectors (e.g., replication defective retroviruses, adenoviruses and adeno-associated viruses), which serve equivalent functions.

[0392] In some embodiments of any of the aspects, the vector is recombinant, e.g., it comprises sequences originating from at least two different sources. In some embodiments of any of the aspects, the vector comprises sequences originating from at least two different species. In some embodiments of any of the aspects, the vector comprises sequences originating from at least two different genes, e.g., it comprises a fusion protein or a nucleic acid encoding an expression product which is operably linked to at least one non-native (e.g., heterologous) genetic control element (e.g., a promoter, suppressor, activator, enhancer, response element, or the like).

[0393] In some embodiments of any of the aspects, the vector or nucleic acid described herein is codon-optimized, e.g., the native or wild-type sequence of the nucleic acid sequence has been altered or engineered to include alternative codons such that altered or engineered nucleic acid encodes the same polypeptide expression product as the native/wild-type sequence, but will be transcribed and/or translated at an improved efficiency in a desired expression system. In some embodiments of any of the aspects, the expression system is an organism other than the source of the native/wild-type sequence (or a cell obtained from such organism). In some embodiments of any of the aspects, the vector and/or nucleic acid sequence described herein is codon-optimized for expression in a mammal or mammalian cell, e.g., a mouse, a murine cell, or a human cell. In some embodiments of any of the aspects, the vector and/or nucleic acid sequence described herein is codon-optimized for expression in a human cell. In some embodiments of any of the aspects, the vector and/or nucleic acid sequence described herein is codon-optimized for expression in a yeast or yeast cell. In some embodiments of any of the aspects, the vector and/or nucleic acid sequence described herein is codon-optimized for expression in a bacterial cell. In some embodiments of any of the aspects, the vector and/or nucleic acid sequence described herein is codon-optimized for expression in an E. coli cell.

[0394] A cloning vector is one which is able to replicate autonomously or integrated in the genome in a host cell, and which is further characterized by one or more endonuclease restriction sites at which the vector can be cut in a determinable fashion and into which a desired DNA sequence (e.g., a DNA template for an saRNA as described herein) can be ligated such that the new recombinant vector retains its ability to replicate in the host cell. In the case of plasmids, replication of the desired sequence can occur many times as the plasmid increases in copy number within the host cell such as a host bacterium or just a single time per host before the host reproduces by mitosis. In the case of phage, replication can occur actively during a lytic phase or passively during a lysogenic phase.

[0395] An expression vector is one into which a desired DNA sequence (e.g., a DNA template for an saRNA as described herein) can be inserted by restriction and ligation such that it is operably joined to regulatory sequences and can be expressed as an saRNA transcript. Vectors can further contain one or more marker sequences suitable for use in the identification of cells which have or have not been transformed or transformed or transfected with the vector. Markers include, for example, genes encoding proteins which increase or decrease either resistance or sensitivity to antibiotics or other compounds (e.g., ampicillin resistance), genes which encode enzymes whose activities are detectable by standard assays known in the art (e.g., β-galactosidase, luciferase or alkaline phosphatase), and genes which visibly affect the phenotype of transformed or transfected cells, hosts, colonies or plaques (e.g., green fluorescent protein). In certain embodiments, the vectors used herein are capable of autonomous replication and expression of the saRNAs present in the DNA segments to which they are operably joined. The sequences expressed will often, but not necessarily, be heterologous to the cell. An expression vector may comprise additional elements, for example, the expression vector may have two replication systems, thus allowing it to be maintained in two organisms, for example in human cells for expression and in a prokaryotic host for cloning and amplification.

[0396] Expression vectors containing all the necessary elements for expression are commercially available and known to those skilled in the art. See, e.g., Sambrook et al., Molecular Cloning: A Laboratory Manual, Second Edition, Cold Spring Harbor Laboratory Press, 1989. Cells are genetically engineered by the introduction into the cells of heterologous DNA (or RNA). That heterologous DNA (or RNA) is placed under operable control of transcriptional elements to permit the expression of the heterologous DNA in the host cell.

[0397] As used herein, the term “viral vector” refers to a nucleic acid vector construct that includes at least one element of viral origin and has the capacity to be packaged into a viral vector particle. The viral vector can contain the nucleic acid encoding a polypeptide as described herein in place of non-essential viral genes. The vector and/or particle may be utilized for the purpose of transferring any nucleic acids into cells either in vitro or in vivo. Numerous forms of viral vectors are known in the art. Non-limiting examples of a viral vector of this invention include an AAV vector, an adenovirus vector, a lentivirus vector, a retrovirus vector, a herpesvirus vector, an alphavirus vector, a poxvirus vector, a baculovirus vector, and a chimeric virus vector.

[0398] It should be understood that the vectors described herein can, in some embodiments, be combined with other suitable compositions and therapies. In some embodiments, the vector is episomal. The use of a suitable episomal vector provides a means of maintaining the nucleic acid of interest (e.g., encoding an saRNA as described herein) in the subject in high copy number extra chromosomal DNA thereby eliminating potential effects of chromosomal integration.

### Compositions and Administration

[0399] The saRNAs described herein can be comprised by compositions, such as pharmaceutical compositions, as described further herein. In some embodiments, saRNAs described herein can be comprised by cells, such as eukaryotic cells. In some embodiments of any of the aspects, the cell is a human cell. In some embodiments the cells are immune cells. In some embodiments of any of the aspects, the cells are T cells, NK cells, Macrophages, or B cells. In some embodiments the cells are T lymphocyte cells. In some embodiments the cells are CD4+ T lymphocyte cells.

[0400] In one aspect described herein is a composition comprising an saRNA as described herein. In one aspect described herein is a composition comprising a nucleic acid or vector comprising or expressing an saRNA as described herein. In one aspect described herein is a composition comprising a cell comprising or expressing an saRNA as described herein.

[0401] In one aspect described herein is a pharmaceutical composition comprising an saRNA as described herein and a pharmaceutically acceptable carrier. In one aspect described herein is a pharmaceutical composition comprising a nucleic acid or vector comprising or expressing an saRNA as described herein and a pharmaceutically acceptable carrier. In one aspect described herein is a pharmaceutical composition comprising a cell comprising or expressing an saRNA as described herein and a pharmaceutically acceptable carrier.

[0402] In some embodiments of any of the aspects, the saRNA is formulated as lipid nanoparticles (LNP). In some embodiments of any of the aspects, the lipid nanoparticle comprises a targeting moiety, specific for a cell or tissue of interest. As a non-limiting example, the LNP can be conjugated to an antibody, such as an anti-CD3 antibody, which is specific for T cells. In some embodiments, the LNPs are formulated with a lipid:oligonucleotide weight ratio of about 10:1. In some embodiments, the LNPs are formulated with a N:P ratio of about 10. In some embodiments, the LNPs are formulated with a N:P ratio of about 1, about 2, about 3, about 4, about 5, about 6, about 7, about 8, about 9, about 10, about 11, about 12, about 13, about 14, about 15, about 16, about 17, about 18, about 19, or about 20.

[0403] In another embodiment, the lipid nanoparticle has an average diameter less than 1000 nm, such as less than 500 nm, less than 300 nm, less than 200 nm, less than 150 nm, less than 100 nm or less than about 50 nm. In another embodiment the diameter ranges from 1000 nm to 50 nm, or from about 500 nm to 50 nm, or from about 300 nm to 50, or from 200 nm to 50, or from 100 nm to 50 nm. In another embodiment, the nanoparticle average diameter is less than about 100 nm.

[0404] In another embodiment, the population of the nanoparticle has a polydispersion index (PDI) of about 2 or less, or about 1 or less, or about 0.5 or less, or about 0.25 or less, or about 0.14 or less.

[0405] In another embodiment, the lipid nanoparticles possess a positive charge.

[0406] In another embodiment, the lipid nanoparticles possess a negative charge.

[0407] In another embodiment, the lipid nanoparticles do not possess an overall charge.

[0408] In some embodiments, lipids in the LNPs comprise ionizable lipids, cholesterol, phospholipids, and/or polyethylene glycol lipids. Further non-limiting examples of lipids for use in LNP formulations include DSPE, SM-102, DMG-PEG2K, DOPE, and/or cholesterol.

[0409] In some embodiments, the lipid nanoparticles can be formulated from one or more of cationic, anionic, neutral, ionizable, and/or zwitterionic lipids, non-limiting examples of which include: phosphatidylcholine, phosphatidylethanolamine, phosphatidylserine, phosphatidylinositol, phosphatidic acid, palmitoyloleryl phosphatidylcholine, lysophosphatidylcholine, lysophosphatidylethanolamine, dipalmitoylphosphatidylcholine, dioleoylphospbatidylcholine, dstearoylphosphatidylcholine dilinoleoylphosphatidylcholine, phosphatidylglycerol, cardiolipin, diacylphosphatidylserine, diacylphosphatidic acid, N-dodecanoyl phosphatidylethanolamines, N-succinyl phosphatidylethanolamines, N-glutarylphosphatidylethanolamines, lysylphosphatidylglycerols, palmitoyloleyolphosphatidylglyeerol (POPG), diacylphosphatidylcholine, diacylphosphatidyletbanolamine, ceramide, sphingomyelin, cephalin, cholesterol, cerebrosides and diacylglycerols, triglycerides, DSPC (1,2-distearoyl-sn-glycero-3-phosphocholine), DPPC (1,2-dipalmitoyl-sn-glycero-3-phosphocholine), DOPE (1,2-dioleyl-sn-glycero-3-phosphoethanolamine), DOPC (1,2-dioleyl-sn-glycero-3-phosphotidylcholine) DPPE (1,2-dipalmitoyl-sn-glycero-3-phosphoethanolamine), DMPE (1,2-dimyristoyl-sn-glycero-3-phosphoethanolamine), DOPG (1,2-dioleoyl-sn-glycero-3-phospho-(1′-rac-glycerol)), Trimyristin (DYNASAN 114), Tripalmitin (DYNASAN 116), Tristearin (DYNASAN 118), Mono-, di-, and triglyceride mixtures, Glyceryl stearates (IMWITOR 900), Glyceryl behenates (COMPRITOL 888 ATO), Glyceryl palmitostearates (PRECIROL ATO 5), stearic acid, Palmitic acid, DPPC, MSPC, DSPE-PEG2000, DSPE-PEG2500, Phosphatidylcholine, Soybean phosphatidylcholine, (4-hydroxybutyl)azanediyl bis(hexane-6,1-diyl)bis(2-hexyldecanoate), (2-hexyldecanoate), 2-[(polyethylene glycol)-2000]-N,N-ditetradecylacetamide, 1,2-distearoyl-sn-glycero-3-phosphocholine, cholesterol, heptadecan-9-yl 8-((2-hydroxyethyl)(6-oxo-6-(undecyloxy)hexyl)amino)octanoate, 1,2-dimyristoyl-rac-glycero-3-methoxypolyethylene glycol-2000, ALC-0315, ALC-0159, SM-102, DTOP, DDAB, DOGS, N-(1,2-dimyristyloxyprop-3-yl)-N,N-dimethyl-N-hydmxyethyl ammonium bromide (“DMRIE”), DODAP, DLinDMA, cKK-E12, OF-02, C12-200, MC3, DLinkC2DMA, ICE (Imidazol-based), HGT5000, HGT5001, HGT4003, N,N-dioleyl-N,N-dimethylammonium chloride (“DODAC”), N-(2,3dioleyloxy)propyl)-N,N,Ntrimethylammonium chloride (“DOTMA”), N-(2,3dioleoyloxy)propyl)-N,N,N-trimethylamntonium chloride (“DODAP, N,NdistearylN,N-dimethylammonium bromide (“DDAB”), 3-(N-(N,N-dimethylaminoethane)-carbamoyl)cholesterol (“DC-Chol”), DOSPA, DODMA and DMDMA, DODAC, 1,2-DiLinoleyloxy-N,N-dimethylaminopropane (DLinDMA), DMRIE, CLinDMA, CpLinDMA, DMOBA, DOcarbDAP, DLinDAP, DLincarbDAP, DLinCDAP, KLin-K-DMA, DLin-K-XTC2-DMA, 3-(4-(bis(2-hydroxydodecyl)amino)butyl)-6-(4-((2-hydroxydodecyl)(2-hydroxyundecyl)amino)butyl)-1,4-dioxane-2,5-dione, 4-(2,2-diocta-9,12-dienyl-[1,3]dioxolan-4-ylmethyl)-dimethylamine, DLinKDMA (see e.g., WO 2009/132131 A1, which is hereby incorporated by reference in its entirety), DLin-K-C2-DMA (see e.g., WO2010042877, which is hereby incorporated by reference in its entirety), DLin-M-C3-DMA (see e.g., WO 2010146740 and/or WO 2010/105209, which are hereby incorporated by reference in their entireties), 2-{4-[(3p)-cholest-5-en-3-yloxy]butoxy}-N,N-dimethyl-3-[(9Z,12Z)-octadeca-9,12-dienlyloxyl]propan-1-amine) (CLinDMA), 3-(5-(bis(2-hydroxydodecyl)amino)pentan-2-yl)-6-(5-((2-hydroxydodecyl)(2-hydroxyundecyl)amino)pentan-2-yl)-1,4-dioxane-2,5-dione, N1GL, N2GL, V1GL, LIPOFECTIN® (commercially available cationic lipid nanoparticles comprising DOTMA and 1,2dioleoyl-sn-3-phosphoethanolamine (“DOPE”)), TRANSFECTAM®, and combinations thereof.

[0410] In some embodiments, the LNPs comprise one or more PEG-modified lipids. In some embodiments, the one or more PEG-modified lipids comprise a poly(ethylene) glycol chain of up to 5 kDa in length covalently attached to a lipid with alkyl chain(s) of C₆-C₂₀ length.

[0411] Other compounds lacking in phosphorus, such as sphingolipid, glycosphingolipid families, diacylglycerols and S-acyloxyacids, are also within the group designated as amphipathic lipids, which can be comprised by the LNPs described herein.

[0412] In some embodiments, the one or more cationic lipids comprised by the LNPs described herein are amino lipids. Amino lipids suitable for use in the LNPs described herein include those described in WO 2017180917, which is hereby incorporated by reference in its entirety. Exemplary amino lipids in WO 2017180917 include those described at paragraph [0744] such as DLin-MC3-DMA (MC3), (13Z,16Z)—N,N-dimethyl-3-nonyldocosa-13,16-dien-1-amine (L608), and Compound 18 described in WO 2017180917. Other exemplary amino lipids include Compound 2, Compound 23, Compound 27, Compound 10, or Compound 20 described in WO 2017180917. Further amino lipids suitable for use in the LNPs described herein include those described in WO2017112865, which is hereby incorporated by reference. Exemplary amino lipids in WO 2017112865 include a compound according to one of formulae (I), (Ia1)-(Ia6), (1b), (II), (I1a), (III), (Ilia), (IV), (17-1), (19-1), (19-11), and (20-1), and compounds of paragraphs [00185], [00201], [0276] in WO 2017112865. In some embodiments, cationic lipids suitable for use in the LNPs described herein include those described in WO2016118725, which is hereby incorporated by reference. Exemplary cationic lipids in WO2016118725 include those such as KL22 and KL25. In some embodiments, cationic lipids suitable for use in the LNPs described herein include those described in WO2016118724, which is hereby incorporated by reference. Exemplary cationic lipids in WO2016118725 include those such as KL10, 1,2-dilinoleyloxy-N,N-dimethylaminopropane (DLin-DMA), and KL25.

[0413] In some embodiments, the saRNA is formulated in a polymeric matrix. In some embodiments, the polymeric matrix can comprise one or more polymer, with or without at one or more lipids, to form nanoparticles.

[0414] In one embodiment, the polymeric matrix containing the saRNA is a reverse micelle nanoparticle which comprises two or more polymers, such as polyethylenes, polycarbonates, polyanhydrides, polyhydroxyacids, polypropylfumerates, polyglycerols, polycaprolactones, polyamides, polyacetals, polyethers, polyesters, poly(orthoesters), polycyanoacrylates, polyvinyl alcohols, polyurethanes, Poly(O-amino esters), polyphosphazenes, polyacrylates, polymethacrylates, polycyanoacrylates, polyureas, polystyrenes, or polyamines, or combinations thereof. In one embodiment, the polymeric matrix comprises one or more polyesters, polyanhydrides, polyethers, polyurethanes, polymethacrylates, polyacrylates or polycyanoacrylates. In one embodiment, the polymeric matrix comprises a polyalkylene glycol, such as polyethylene glycol. In another embodiment, the polymeric matrix comprises PLGA, PLA, PGA, or a polycaprolactone. In another embodiment, the polymeric matrix comprises a copolymer of two or more polymers, such as a copolymer of PLGA or PLA and PEG. The polymeric matrix can comprise PLGA or PLA and a copolymer of PLGA or PLA and PEG.

[0415] In another embodiment, the polymeric matrix comprises a lipid-terminated polyalkylene glycol and a polyester, such as a lipid-terminated PEG and PLGA. The lipid can be one such as 1,2 distearoyl-sn-glycero-3-phosphoethanolamine (DSPE), and salts thereof.

[0416] In one embodiment, the reverse micelle comprises an amphipathic lipid, such as lecithin, phosphatidylcholine, lipid A, cholesterol, dolichol, shingosine, sphingomyelin, ceramide, cerebroside, sulfatide, glycosylceramide, phytosphingosine, phosphatidylethanolamine, phosphatidylglycerol, phosphatidylinositol, phosphatidylserine, cardiolipin, phophatidic acid, or lysophophatides, or combinations thereof.

[0417] In some embodiments, the technology described herein relates to a pharmaceutical composition comprising an saRNA as described herein, and optionally a pharmaceutically acceptable carrier. In some embodiments, the active ingredients of the pharmaceutical composition comprise an saRNA as described herein. In some embodiments, the active ingredients of the pharmaceutical composition consist essentially of an saRNA as described herein. In some embodiments, the active ingredients of the pharmaceutical composition consist of an saRNA as described herein. Pharmaceutically acceptable carriers and diluents include saline, aqueous buffer solutions, solvents and/or dispersion media. The use of such carriers and diluents is well known in the art. Some non-limiting examples of materials which can serve as pharmaceutically-acceptable carriers include: (1) sugars, such as lactose, glucose and sucrose; (2) starches, such as corn starch and potato starch; (3) cellulose, and its derivatives, such as sodium carboxymethyl cellulose, methylcellulose, ethyl cellulose, microcrystalline cellulose and cellulose acetate; (4) powdered tragacanth; (5) malt; (6) gelatin; (7) lubricating agents, such as magnesium stearate, sodium lauryl sulfate and talc; (8) excipients, such as cocoa butter and suppository waxes; (9) oils, such as peanut oil, cottonseed oil, safflower oil, sesame oil, olive oil, corn oil and soybean oil; (10) glycols, such as propylene glycol; (11) polyols, such as glycerin, sorbitol, mannitol and polyethylene glycol (PEG); (12) esters, such as ethyl oleate and ethyl laurate; (13) agar; (14) buffering agents, such as magnesium hydroxide and aluminum hydroxide; (15) alginic acid; (16) pyrogen-free water; (17) isotonic saline; (18) Ringer's solution; (19) ethyl alcohol; (20) pH buffered solutions; (21) polyesters, polycarbonates and/or polyanhydrides; (22) bulking agents, such as polypeptides and amino acids; (23) serum component, such as serum albumin, HDL and LDL; (24) C₂-C₁₂ alcohols; and (25) other non-toxic compatible substances employed in pharmaceutical formulations. Wetting agents, coloring agents, release agents, coating agents, sweetening agents, flavoring agents, perfuming agents, preservative and antioxidants can also be present in the formulation. The terms such as “excipient”, “carrier”, “pharmaceutically acceptable carrier” or the like are used interchangeably herein. In some embodiments, the carrier inhibits the degradation of the active agent, e.g., an saRNA as described herein.

[0418] In some embodiments, the pharmaceutical composition comprising an saRNA as described herein can be a parenteral dose form (i.e., administered or occurring elsewhere in the body than the mouth and alimentary canal). Since administration of parenteral dosage forms typically bypasses the patient's natural defenses against contaminants, parenteral dosage forms are preferably sterile or capable of being sterilized prior to administration to a patient. Examples of parenteral dosage forms include, but are not limited to, solutions ready for injection, dry products ready to be dissolved or suspended in a pharmaceutically acceptable vehicle for injection, suspensions ready for injection, and emulsions.

[0419] Suitable vehicles that can be used to provide parenteral dosage forms of saRNAs as disclosed within are well known to those skilled in the art. Non-limiting examples include, without limitation: sterile water; water for injection USP; saline solution; phosphate-based saline; glucose solution; aqueous vehicles such as but not limited to, sodium chloride injection, Ringer's injection, dextrose injection, dextrose and sodium chloride injection, and lactated Ringer's injection; water-miscible vehicles such as, but not limited to, ethyl alcohol, polyethylene glycol, and propylene glycol; and non-aqueous vehicles such as, but not limited to, corn oil, cottonseed oil, peanut oil, sesame oil, ethyl oleate, isopropyl myristate, and benzyl benzoate.

[0420] Pharmaceutical compositions comprising an saRNA as described herein can also be formulated to be suitable for oral administration, for example as discrete dosage forms, such as, but not limited to, tablets (including without limitation scored or coated tablets), pills, caplets, capsules, chewable tablets, powder packets, cachets, troches, wafers, aerosol sprays, or liquids, such as but not limited to, syrups, elixirs, solutions or suspensions in an aqueous liquid, a non-aqueous liquid, an oil-in-water emulsion, or a water-in-oil emulsion. Such compositions contain a predetermined amount of the saRNA, and can be prepared by methods of pharmacy well known to those skilled in the art. See generally, Remington: The Science and Practice of Pharmacy, 21st Ed., Lippincott, Williams, and Wilkins, Philadelphia PA. (2005).

[0421] In some embodiments, the methods described herein comprise administering an effective amount of compositions described herein, e.g. an saRNA as described herein to a subject in order to alleviate a symptom of a disease or disorder. As used herein, “alleviating a symptom of a disease or disorder” is ameliorating any condition or symptom associated with the disease or disorder. As compared with an equivalent untreated control, such reduction is by at least 5%, 10%, 20%, 40%, 50%, 60%, 80%, 90%, 95%, 99% or more as measured by any standard technique. A variety of means for administering the compositions described herein to subjects are known to those of skill in the art.

[0422] In some embodiments of any of the aspects, the saRNA is formulated at a dose of about 5×10⁻⁴ mg/kg. In some embodiments of any of the aspects, the saRNA is formulated at a dose of about 5×10⁻³ mg/kg. In some embodiments of any of the aspects, the saRNA is formulated at a dose of about 5×10⁻² mg/kg. In some embodiments of any of the aspects, the saRNA is formulated at a dose of about 5×10⁻¹ mg/kg. In some embodiments of any of the aspects, the saRNA is formulated at a dose of about 1 ng. In some embodiments of any of the aspects, the saRNA is formulated at a dose of about 10 ng. In some embodiments of any of the aspects, the saRNA is formulated at a dose of about 100 ng. In some embodiments of any of the aspects, the saRNA is formulated at a dose of about 1000 ng. In some embodiments of any of the aspects, the saRNA is formulated at a dose of about 10,000 ng. In some embodiments of any of the aspects, the saRNA is formulated at a dose of about 2.5 μg. In some embodiments of any of the aspects, the saRNA can be formulated at a dose of about 0.1 μg to about 100 μg. In embodiments with a subject (e.g., human subject) of approximately 70 kg, saRNA can be formulated at a dose of about 1×10⁻⁶ mg/kg to 1×10⁻³ mg/kg.

[0423] For systemic administration, subjects can be administered a therapeutic amount of a composition comprising an saRNA as described herein, such as, e.g., 1×10⁻⁶ mg/kg, 1×10⁻⁹ mg/kg, 1×10⁻⁴ mg/kg, 1×10⁻³ mg/kg, 1×10⁻² mg/kg, 0.1 mg/kg, 0.5 mg/kg, 1.0 mg/kg or more.

[0424] The term “effective amount” as used herein refers to the amount of saRNA needed to alleviate at least one or more symptom of the disease or disorder, and relates to a sufficient amount of pharmacological composition to provide the desired effect. The term “therapeutically effective amount” therefore refers to an amount of saRNA that is sufficient to provide a particular alleviating effect when administered to a typical subject. An effective amount as used herein, in various contexts, would also include an amount sufficient to delay the development of a symptom of the disease, alter the course of a symptom disease (for example but not limited to, slowing the progression of a symptom of the disease), or reverse a symptom of the disease. Thus, it is not generally practicable to specify an exact “effective amount”. However, for any given case, an appropriate “effective amount” can be determined by one of ordinary skill in the art using only routine experimentation.

[0425] Effective amounts, toxicity, and therapeutic efficacy can be determined by standard pharmaceutical procedures in cell cultures or experimental animals, e.g., for determining the ED50 (the dose therapeutically effective in 50% of the population). The dosage can vary depending upon the dosage form employed and the route of administration utilized. A therapeutically effective dose can be estimated initially from cell culture assays. Also, a dose can be formulated in animal models to achieve a circulating plasma concentration range that includes the IC50 (i.e., the concentration of saRNA, which achieves a half-maximal inhibition of symptoms) as determined in cell culture, or in an appropriate animal model. Levels in plasma can be measured, for example, by PCR. The effects of any particular dosage can be monitored by a suitable bioassay. The dosage can be determined by a physician and adjusted, as necessary, to suit observed effects of the treatment.

[0426] The dosage ranges for the administration of the saRNA, according to the methods described herein depend upon, for example, the form of saRNA, its potency, and the extent to which symptoms, markers, or indicators of a condition described herein are desired to be reduced. The dosage should not be so large as to cause adverse side effects, such as an autoimmune reaction. Generally, the dosage will vary with the age, condition, and sex of the patient and can be determined by one of skill in the art. The dosage can also be adjusted by the individual physician in the event of any complication.

[0427] The efficacy of the saRNA in, e.g. the treatment of a condition described herein, or to induce a response as described herein can be determined by the skilled clinician. However, a treatment is considered “effective treatment,” as the term is used herein, if one or more of the signs or symptoms of a condition described herein are altered in a beneficial manner, other clinically accepted symptoms are improved, or even ameliorated, or a desired response is induced e.g., by at least 10% following treatment according to the methods described herein. Efficacy can be assessed, for example, by measuring a marker, indicator, symptom, and/or the incidence of a condition treated according to the methods described herein or any other measurable parameter appropriate. Efficacy can also be measured by a failure of an individual to worsen as assessed by hospitalization, or need for medical interventions (i.e., progression of the disease is halted). Methods of measuring these indicators are known to those of skill in the art and/or are described herein. Treatment includes any treatment of a disease in an individual or an animal (some non-limiting examples include a human or an animal) and includes: (1) inhibiting the disease, e.g., preventing a worsening of symptoms (e.g., pain or inflammation); or (2) relieving the severity of the disease, e.g., causing regression of symptoms. An effective amount for the treatment of a disease means that amount which, when administered to a subject in need thereof, is sufficient to result in effective treatment as that term is defined herein, for that disease. Efficacy of an agent can be determined by assessing physical indicators of a condition or desired response. It is well within the ability of one skilled in the art to monitor efficacy of administration and/or treatment by measuring any one of such parameters, or any combination of parameters.

[0428] Efficacy can be assessed in animal models of a condition described herein or using in vitro assays. When using an experimental animal model or an in vitro assay, efficacy of treatment is evidenced when a statistically significant change in a marker is observed.

[0429] With respect to duration and frequency of treatment, it is typical for skilled clinicians to monitor subjects in order to determine when the treatment is providing therapeutic benefit, and to determine whether to increase or decrease dosage, increase or decrease administration frequency, discontinue treatment, resume treatment, or make other alterations to the treatment regimen.

[0430] In certain embodiments, an effective dose of a composition comprising an saRNA as described herein can be administered to a patient once. In certain embodiments, an effective dose of a composition comprising an saRNA as described herein can be administered to a patient repeatedly.

[0431] The dosing schedule can vary from once a week to daily depending on a number of clinical factors, such as the subject's sensitivity to the saRNA. The desired dose or amount can be administered at one time or divided into subdoses, e.g., 2-4 subdoses and administered over a period of time, e.g., at appropriate intervals through the day or other appropriate schedule. In some embodiments, administration can be one or more doses and/or treatments daily over a period of weeks or months. Examples of dosing and/or treatment schedules are administration daily, twice daily, three times daily or four or more times daily over a period of 1 week, 2 weeks, 3 weeks, 4 weeks, 1 month, 2 months, 3 months, 4 months, 5 months, or 6 months, or more. A composition comprising an saRNA as described herein can be administered over a period of time, such as over a 5 minute, 10 minute, 15 minute, 20 minute, or 25 minute period.

[0432] In some embodiments, after an initial treatment regimen, the treatments can be administered on a less frequent basis. For example, after treatment biweekly for three months, treatment can be repeated once per month, for six months or a year or longer.

[0433] A variety of means for administering the compositions described herein to subjects are known to those of skill in the art. Such methods can include, but are not limited to intraocular, intraosseous (IO), intraperitoneal (IP), subcutaneous (SC), intravenous (IV), intramuscular (IM), intrarectal, intravaginal, intraarticular (IA), inhalation, or topical administration. Further non-limiting administration methods include oral, parenteral, intravenous, intramuscular, transdermal, airway (aerosol), pulmonary, cutaneous, injection, or intratumoral administration. Administration can be local or systemic.

[0434] In some embodiments of any of the aspects, an saRNA as described herein is administered as a monotherapy, e.g., another treatment for the disease or disorder is not administered to the subject.

[0435] In some embodiments of any of the aspects, the methods described herein can further comprise administering a second agent and/or treatment to the subject, e.g. as part of a combinatorial therapy. Non-limiting examples of a second agent and/or treatment can include a cancer therapy selected from the group consisting of radiation therapy, surgery, gemcitabine, cisplatin, paclitaxel, carboplatin, bortezomib, AMG479, vorinostat, rituximab, temozolomide, rapamycin, ABT-737, PI-103; alkylating agents such as thiotepa and CYTOXAN® cyclophosphamide; alkyl sulfonates such as busulfan, improsulfan and piposulfan; aziridines such as benzodopa, carboquone, meturedopa, and uredopa; ethylenimines and methylmelamines including altretamine, triethylenemelamine, trietylenephosphoramide, triethylenethiophosphoramide and trimethylol melamine; acetogenins (especially bullatacin and bullatacinone); a camptothecin (including the synthetic analogue topotecan); bryostatin; callystatin; CC-1065 (including its adozelesin, carzelesin and bizelesin synthetic analogues); cryptophycins (particularly cryptophycin 1 and cryptophycin 8); dolastatin; duocarmycin (including the synthetic analogues, KW-2189 and CB1-TM1); eleutherobin; pancratistatin; a sarcodictyin; spongistatin; nitrogen mustards such as chlorambucil, chlornaphazine, cholophosphamide, estramustine, ifosfamide, mechlorethamine, mechlorethamine oxide hydrochloride, melphalan, novembichin, phenesterine, prednimustine, trofosfamide, uracil mustard; nitrosoureas such as carmustine, chlorozotocin, fotemustine, lomustine, nimustine, and ranimustine; antibiotics such as the enediyne antibiotics (e.g., calicheamicin, especially calicheamicin gamma1I and calicheamicin omegaI1 (see, e.g., Agnew, Chem. Intl. Ed. Engl., 33: 183-186 (1994)); dynemicin, including dynemicin A; bisphosphonates, such as clodronate; an esperamicin; as well as neocarzinostatin chromophore and related chromoprotein enediyne antibiotic chromophores), aclacinomycins, actinomycin, authramycin, azaserine, bleomycins, cactinomycin, carabicin, caminomycin, carzinophilin, chromomycins, dactinomycin, daunorubicin, detorubicin, 6-diazo-5-oxo-L-norleucine, ADRIAMYCIN® doxorubicin (including morpholino-doxorubicin, cyanomorpholino-doxorubicin, 2-pyrrolino-doxorubicin and deoxydoxorubicin), epirubicin, esorubicin, idarubicin, marcellomycin, mitomycins such as mitomycin C, mycophenolic acid, nogalamycin, olivomycins, peplomycin, potfiromycin, puromycin, quelamycin, rodorubicin, streptonigrin, streptozocin, tubercidin, ubenimex, zinostatin, zorubicin; anti-metabolites such as methotrexate and 5-fluorouracil (5-FU); folic acid analogues such as denopterin, methotrexate, pteropterin, trimetrexate; purine analogs such as fludarabine, 6-mercaptopurine, thiamiprine, thioguanine; pyrimidine analogs such as ancitabine, azacitidine, 6-azauridine, carmofur, cytarabine, dideoxyuridine, doxifluridine, enocitabine, floxuridine; androgens such as calusterone, dromostanolone propionate, epitiostanol, mepitiostane, testolactone; anti-adrenals such as aminoglutethimide, mitotane, trilostane; folic acid replenisher such as frolinic acid; aceglatone; aldophosphamide glycoside; aminolevulinic acid; eniluracil; amsacrine; bestrabucil; bisantrene; edatraxate; defofamine; demecolcine; diaziquone; elformithine; elliptinium acetate; an epothilone; etoglucid; gallium nitrate; hydroxyurea; lentinan; lonidainine; maytansinoids such as maytansine and ansamitocins; mitoguazone; mitoxantrone; mopidanmol; nitraerine; pentostatin; phenamet; pirarubicin; losoxantrone; podophyllinic acid; 2-ethylhydrazide; procarbazine; PSK® polysaccharide complex (JHS Natural Products, Eugene, Oreg.); razoxane; rhizoxin; sizofuran; spirogermanium; tenuazonic acid; triaziquone; 2,2′,2″-trichlorotriethylamine; trichothecenes (especially T-2 toxin, verracurin A, roridin A and anguidine); urethan; vindesine; dacarbazine; mannomustine; mitobronitol; mitolactol; pipobroman; gacytosine; arabinoside (“Ara-C”); cyclophosphamide; thiotepa; taxoids, e.g., TAXOL® paclitaxel (Bristol-Myers Squibb Oncology, Princeton, N.J.), ABRAXANE® Cremophor-free, albumin-engineered nanoparticle formulation of paclitaxel (American Pharmaceutical Partners, Schaumberg, Ill.), and TAXOTERE® doxetaxel (Rhone-Poulenc Rorer, Antony, France); chloranbucil; GEMZAR® gemcitabine; 6-thioguanine; mercaptopurine; methotrexate; platinum analogs such as cisplatin, oxaliplatin and carboplatin; vinblastine; platinum; etoposide (VP-16); ifosfamide; mitoxantrone; vincristine; NAVELBINE® vinorelbine; novantrone; teniposide; edatrexate; daunomycin; aminopterin; xeloda; ibandronate; irinotecan (Camptosar, CPT-11) (including the treatment regimen of irinotecan with 5-FU and leucovorin); topoisomerase inhibitor RFS 2000; difluoromethylornithine (DMFO); retinoids such as retinoic acid; capecitabine; combretastatin; leucovorin (LV); oxaliplatin, including the oxaliplatin treatment regimen (FOLFOX); lapatinib (Tykerb®); inhibitors of PKC-alpha, Raf, H-Ras, EGFR (e.g., erlotinib (Tarceva®)) and VEGF-A that reduce cell proliferation and pharmaceutically acceptable salts, acids or derivatives of any of the above.

[0436] One of skill in the art can readily identify a chemotherapeutic agent of use (e.g. see Physicians' Cancer Chemotherapy Drug Manual 2014, Edward Chu, Vincent T. DeVita Jr., Jones & Bartlett Learning; Principles of Cancer Therapy, Chapter 85 in Harrison's Principles of Internal Medicine, 18th edition; Therapeutic Targeting of Cancer Cells: Era of Molecularly Targeted Agents and Cancer Pharmacology, Chs. 28-29 in Abeloff's Clinical Oncology, 2013 Elsevier; and Fischer D S (ed): The Cancer Chemotherapy Handbook, 4th ed. St. Louis, Mosby-Year Book, 2003).

[0437] In addition, the methods of treatment can further include the use of radiation or radiation therapy. Further, the methods of treatment can further include the use of surgical treatments.

[0438] The methods described herein can further comprise administering a second agent and/or treatment to the subject, e.g. as part of a combinatorial therapy. By way of non-limiting example, if a subject is to be treated for pain or inflammation according to the methods described herein, the subject can also be administered a second agent and/or treatment known to be beneficial for subjects suffering from pain or inflammation. Examples of such agents and/or treatments include, but are not limited to, non-steroidal anti-inflammatory drugs (NSAIDs—such as aspirin, ibuprofen, or naproxen); corticosteroids, including glucocorticoids (e.g. cortisol, prednisone, prednisolone, methylprednisolone, dexamethasone, betamethasone, triamcinolone, and beclometasone); methotrexate; sulfasalazine; leflunomide; anti-TNF medications; cyclophosphamide; pro-resolving drugs; mycophenolate; or opiates (e.g. endorphins, enkephalins, and dynorphin), steroids, analgesics, barbiturates, oxycodone, morphine, lidocaine, and the like.

[0439] In some embodiments of any of the aspects, the saRNAs described herein can be co-administered with synergistic therapeutics. Non-limiting examples of such synergistic therapeutics include RNA (e.g., siRNA, shRNA, miRNA), small-molecules, and/or checkpoint inhibitors. Such co-administration can increase activation, antigen presentation, and/or function of cells, including but not limited to T cells and dendritic cells.

[0440] Non-limiting examples of immune checkpoint inhibitors (ICIs) include: pembrolizumab (Keytruda®), nivolumab (Opdivo®), cemiplimab (Libtayo®), spartalizumab, camrelizumab (AiRuiKa™), sintilimab (TYVYT®), tislelizumab, toripalimab (Tuoyi™), dostarlimab (JEMPERLI), INCMGA00012, AMP-224, AMP-514 (MEDI0608), atezolizumab (Tecentriq®), avelumab (Bavencio®), envafolimab (KN035), cosibelimab (CK-301), AUNP12, CA-170, BMS-986189, BMS-936559 (MDX-1105), durvalumab (IMFINZI®), tremelimumab, and ipilimumab (Yervoy®). See e.g., US Patents U.S. Pat. Nos. 5,811,097, 5,855,887, 6,051,227, 6,682,736, 6,984,720, 7,595,048, 7,605,238, 7,943,743, 8,008,449, 8,217,149, 8,354,509, 8,383,796, 8,728,474, 8,735,553, 8,779,105, 8,779,108, 8,907,053, 8,900,587, 8,952,136, 9,067,999, 9,073,994, 9,683,048, 9,987,500, U.S. Ser. No. 10/160,736, U.S. Ser. No. 10/316,089, U.S. Ser. No. 10/441,655, U.S. Ser. No. 10/590,199, U.S. Ser. No. 11/225,522, US Patent Publication US2014341917; Storz et al., MAbs. 2016 January; 8(1): 10-26; the contents of each of which are incorporated herein by reference in their entireties.

Exemplary Uses of saRNAs

[0441] Described herein are exemplary uses of the saRNAs described herein. In one aspect, described herein is a method of expressing at least one cargo of interest in a cell, the method comprising contacting the cell with at least one saRNA as described herein. In some embodiments of any of the aspects, the cell is a human cell. In some embodiments, the saRNA is delivered to the cell in situ. In some embodiments, the saRNA is delivered to the cell ex vivo. In some embodiments of any of the aspects, the saRNA is delivered to the cell by electroporation. In some embodiments of any of the aspects, the saRNA is delivered to the cell by lipid nanoparticles. In some embodiments of any of the aspects, a plurality of distinct saRNAs is delivered to a mixture of cells.

[0442] In another aspect, described herein is a method of expressing at least one cargo in a subject in need thereof, the method comprising administering to the subject an effective amount of a pharmaceutical composition as described herein, e.g., encoding, expressing, or comprising at least one saRNA as described herein.

[0443] As used herein, a “subject” means a human or animal. Usually the animal is a vertebrate such as a primate, rodent, domestic animal or game animal. Primates include chimpanzees, cynomolgus monkeys, spider monkeys, and macaques, e.g., Rhesus. Rodents include mice, rats, woodchucks, ferrets, rabbits and hamsters. Domestic and game animals include cows, horses, pigs, deer, bison, buffalo, feline species, e.g., domestic cat, canine species, e.g., dog, fox, wolf, avian species, e.g., chicken, emu, ostrich, and fish, e.g., trout, catfish and salmon. In some embodiments, the subject is a mammal, e.g., a primate, e.g., a human. The terms, “individual,” “patient” and “subject” are used interchangeably herein.

[0444] Preferably, the subject is a mammal. The mammal can be a human, non-human primate, mouse, rat, dog, cat, horse, or cow, but is not limited to these examples. Mammals other than humans can be advantageously used as subjects that represent animal models of a disease or disorder. In some embodiments of any of the aspects, the subject is a human. In some embodiments of any of the aspects, the subject is a livestock animal. In some embodiments of any of the aspects, the subject is a domestic or tamed animal, such as a pet, including but not limited to a dog, cat, guinea pig, rabbit, rat, mouse, or hamster. In some embodiments of any of the aspects, the subject is a fish or a bird or a lizard or a snake. A subject can be male or female.

[0445] In some embodiments of any of the aspects, the subject has cancer. In some embodiments of any of the aspects, the subject is in need of vaccination for an infectious disease. In some embodiments of any of the aspects, the subject is in need of protein replacement therapy. In some embodiments of any of the aspects, the subject is in need of antibody therapy. In some embodiments of any of the aspects, the subject is in need of treatment for diabetes and/or obesity. In some embodiments of any of the aspects, the subject is in need of BITE therapy.

[0446] A subject can be one who has been previously diagnosed with or identified as suffering from or having such a condition in need of treatment or one or more complications related to such a condition, and optionally, have already undergone treatment for such a disease or disorder or the one or more complications related to that disease or disorder. Alternatively, a subject can also be one who has not been previously diagnosed as having that disease or disorder or one or more complications related to the disease or disorder. For example, a subject can be one who exhibits one or more risk factors for the disease or disorder or one or more complications related to the disease or disorder or a subject who does not exhibit risk factors. A “subject in need” of treatment for a particular condition can be a subject having that condition, diagnosed as having that condition, or at risk of developing that condition.

[0447] In some embodiments of any of the aspects, an saRNA as described herein increases the level of expression of a cargo protein in a cell, e.g., by at least 1%, at least 5%, at least 10%, at least 20%, at least 30%, at least 40%, at least 50%, at least 60%, at least 70%, at least 80%, at least 90%, at least 100%, at least 2-fold, at least 3-fold, at least 4-fold, at least 5-fold, or at least 10-fold, or more, as compared to a cell that does not comprise the saRNA.

[0448] In some embodiments of any of the aspects, use of a modified saRNA (e.g., comprising at least 25% modified nucleotides) has beneficial, unexpected results compared to a corresponding saRNA with less than 25% modified nucleotides.

[0449] In some embodiments of any of the aspects, the modified saRNA replicates at a level greater than or equal to that of an equivalent dose of a corresponding saRNA with less than 25% modified nucleotides. In some embodiments of any of the aspects, the modified saRNA replicates at a level equal to that of an equivalent dose of a corresponding saRNA with less than 25% modified nucleotides. In some embodiments of any of the aspects, the modified saRNA replicates at a level that is at least 1%, at least 5%, at least 10%, at least 20%, at least 30%, at least 40%, at least 50%, at least 60%, at least 70%, at least 80%, at least 90%, at least 100%, at least 2-fold, at least 3-fold, at least 4-fold, at least 5-fold, or at least 10-fold, greater, or more, than that of an equivalent dose of a corresponding saRNA with less than 25% modified nucleotides.

[0450] In some embodiments of any of the aspects, the modified saRNA expresses the cargo at a level greater than or equal to that of an equivalent dose of a corresponding saRNA with less than 25% modified nucleotides. In some embodiments of any of the aspects, the modified saRNA expresses the cargo at a level equal to that of an equivalent dose of a corresponding saRNA with less than 25% modified nucleotides. In some embodiments of any of the aspects, the modified saRNA expresses the cargo at a level that is at least 1%, at least 5%, at least 10%, at least 20%, at least 30%, at least 40%, at least 50%, at least 60%, at least 70%, at least 80%, at least 90%, at least 100%, at least 2-fold, at least 3-fold, at least 4-fold, at least 5-fold, or at least 10-fold, greater, or more, than that of an equivalent dose of a corresponding saRNA with less than 25% modified nucleotides.

[0451] In some embodiments of any of the aspects, the transfection efficiency of the modified saRNA is greater than or equal to that of an equivalent dose of a corresponding saRNA with less than 25% modified nucleotides. In some embodiments of any of the aspects, the transfection efficiency of the modified saRNA is equal to that of an equivalent dose of a corresponding saRNA with less than 25% modified nucleotides. In some embodiments of any of the aspects, the transfection efficiency of the modified saRNA is at a level that is at least 1%, at least 5%, at least 10%, at least 20%, at least 30%, at least 40%, at least 50%, at least 60%, at least 70%, at least 80%, at least 90%, at least 100%, at least 2-fold, at least 3-fold, at least 4-fold, at least 5-fold, or at least 10-fold, greater, or more, than that of an equivalent dose of a corresponding saRNA with less than 25% modified nucleotides.

[0452] In some embodiments of any of the aspects, the modified saRNA produces an early interferon response in the subject. In some embodiments of any of the aspects, the early interferon response is decreased compared to an equivalent dose of a corresponding saRNA with less than 25% modified nucleotides. In some embodiments of any of the aspects, the early interferon response is decreased by at least 1%, at least 5%, at least 10%, at least 20%, at least 30%, at least 40%, at least 50%, at least 60%, at least 70%, at least 80%, at least 90%, at least 100%, at least 2-fold, at least 3-fold, at least 4-fold, at least 5-fold, or at least 10-fold, greater, or more, compared to an equivalent dose of a corresponding saRNA with less than 25% modified nucleotides.

[0453] In some embodiments of any of the aspects, the cargo is expressed at a detectable level from the modified saRNA for an increased time period compared to an equivalent dose of a corresponding saRNA with less than 25% modified nucleotides. In some embodiments of any of the aspects, the cargo is expressed at a detectable level from the modified saRNA for a time period that is increased that is at least 1%, at least 5%, at least 10%, at least 20%, at least 30%, at least 40%, at least 50%, at least 60%, at least 70%, at least 80%, at least 90%, at least 100%, at least 2-fold, at least 3-fold, at least 4-fold, at least 5-fold, or at least 10-fold, greater, or more, compared to an equivalent dose of a corresponding saRNA with less than 25% modified nucleotides.

[0454] In some embodiments of any of the aspects, an saRNA as described herein permits tissue, organ, or cell-type specific expression of the cargo. In some embodiments of any of the aspects, a modified saRNA as described herein permits tissue, organ, or cell-type specific expression of the cargo.

[0455] In some embodiments of any of the aspects, the saRNA comprises greater than 50% substitution of uridine with 5-methyluridine. In some embodiments of any of the aspects, the saRNA comprising greater than 50% substitution of uridine with 5-methyluridine has increased kidney specific expression of the cargo compared to an equivalent dose of a corresponding saRNA comprising less than 50% substitution of uridine with 5-methyluridine. In some embodiments of any of the aspects, the kidney specific expression is increased by at least 1%, at least 5%, at least 10%, at least 20%, at least 30%, at least 40%, at least 50%, at least 60%, at least 70%, at least 80%, at least 90%, at least 100%, at least 2-fold, at least 3-fold, at least 4-fold, at least 5-fold, or at least 10-fold, greater, or more.

[0456] In some embodiments of any of the aspects, a modified saRNA modulates cellular differentiation of a cell containing the saRNA at a level equivalent to or greater than the level of modulation achieved with an equivalent dose of a corresponding saRNA with less than 25% modified nucleotides. In some embodiments of any of the aspects, a modified saRNA modulates cellular differentiation of a cell containing the saRNA at a level equivalent to the level of modulation achieved with an equivalent dose of a corresponding saRNA with less than 25% modified nucleotides. In some embodiments of any of the aspects, a modified saRNA modulates cellular differentiation of a cell containing the saRNA at a level that is at least 1%, at least 5%, at least 10%, at least 20%, at least 30%, at least 40%, at least 50%, at least 60%, at least 70%, at least 80%, at least 90%, at least 100%, at least 2-fold, at least 3-fold, at least 4-fold, at least 5-fold, or at least 10-fold, greater, or more, than the level of modulation achieved with an equivalent dose of a corresponding saRNA with less than 25% modified nucleotides.

[0457] In some embodiments of any of the aspects, a cell is modulated by expression of a stem cell transcription factor encoded by the saRNA. In some embodiments of any of the aspects, a cell is modulated by an saRNA as described herein to become a stem cell.

[0458] In some embodiments of any of the aspects, at least one cargo is expressed constitutively (i.e., in an ongoing manner) in the cell. In some embodiments of any of the aspects, at least one cargo is expressed constitutively (i.e., in an ongoing manner) in the subject.

[0459] In some embodiments of any of the aspects, the cargo comprises a chimeric antigen receptor. In some embodiments of any of the aspects, the cargo comprises multiple chimeric antigen receptors. In some embodiments of any of the aspects, the saRNA encodes and expresses a plurality of cargo proteins that are capable of interacting with each other. In some embodiments of any of the aspects, the interaction of the plurality of cargo proteins results in conditional activity of the cell transfected by the saRNA. In some embodiments of any of the aspects, the cargo proteins capable of interacting with each other are chimeric antigen receptors with activating and/or inhibitory functions. In some embodiments of any of the aspects, the cargo comprises 1, 2, 3, 4, 5, 6, 7, 8, 9, 10, or more chimeric antigen receptors. In some embodiments of any of the aspects, the cargo comprises a protein comprising a chimeric antigen receptor comprising an extracellular domain that senses at least one input signal. In some embodiments of any of the aspects, the cargo is a protein comprising at least one chimeric antigen receptor, and the input is a small molecule and/or a protein. In some embodiments of any of the aspects, the cargo is a protein comprising at least one domain responsive to an external input. In some embodiments of any of the aspects, the cargo is a protein comprising at least one repressible protease domain that responds to at least one protease inhibitor to regulate activity of the cargo.

[0460] In some embodiments of any of the aspects, the activity of the cargo protein expressed by the saRNA is controlled by administration of a small molecule and/or a protein and/or an RNA molecule. In some embodiments of any of the aspects, the RNA molecule is an aptamer. In some embodiments of any of the aspects, the protein is a chimeric antigen receptor (CAR), and the activity of the CAR is regulated by at least one small molecule-responsive domain. In some embodiments of any of the aspects, the activity of the cargo protein expressed by the saRNA is increased and/or decreased by administration of at least one small molecule. In some embodiments of any of the aspects, the at least one small molecule is a protease inhibitor or a molecule capable of interacting with at least one protein domain in the cargo protein.

[0461] In some embodiments of any of the aspects, a method as described herein comprises contacting a cell comprising at least one saRNA with at least one input to control the fate or function of the cell. In some embodiments of any of the aspects, a method as described herein comprises administering at least one input to control the fate or function of at least one cell in a subject, wherein the subject has previously been administered at least one saRNA as described herein.

[0462] In some embodiments of any of the aspects, the input is endogenous to the environment of the cell comprising the saRNA. In some embodiments of any of the aspects, the input is exogenous to the environment of the cell comprising the saRNA. In some embodiments of any of the aspects, the input comprises a cell, a protein, a small molecule, a specific wavelength or wavelengths of light, a specific temperature, and/or a magnetic field.

[0463] In some embodiments of any of the aspects, the input results in inhibition of a repressible protease domain in the cargo encoded by an saRNA as described herein. In some embodiments of any of the aspects, the input results in the activation of a repressible protease domain in the cargo encoded by an saRNA as described herein. In some embodiments of any of the aspects, the input results in oligomerization and a resultant activation of the cargo. In some embodiments of any of the aspects, the input results in oligomerization and a resultant inhibition of the cargo.

[0464] In some embodiments of any of the aspects, control of the cell requires the presence of all inputs simultaneously. In some embodiments of any of the aspects, control of the cell requires the presence of any input. In some embodiments of any of the aspects, control of the cell requires both the presence and absence of a distinct combination of inputs.

[0465] In some embodiments of any of the aspects, addition or removal of at least one saRNA and/or at least one input results in an altered fate and/or function of at least one cell. In some embodiments of any of the aspects, the fate of the cell (e.g., following adding or removing at least one input) is an altered cell type and/or an altered cell localization. In some embodiments of any of the aspects, the altered function of the cell is lytic. In some embodiments of any of the aspects, the altered function of the cell is stimulatory. In some embodiments of any of the aspects, the altered function of the cell is immunomodulatory. In some embodiments of any of the aspects, the input results in death of the cell comprising at least one saRNA as described herein. In some embodiments of any of the aspects, the input results in increased clearance rate of the cell comprising at least one saRNA as described herein. In some embodiments of any of the aspects, the input results in cell-cycle arrest of the cell comprising at least one saRNA as described herein.

[0466] In some embodiments of any of the aspects, the cargo of the saRNA encodes for and expresses at least one cargo protein, at least one protein reporters and/or at least one expression-enhancing protein. In some embodiments of any of the aspects, the cargo of the saRNA encodes for and expresses at least one cargo protein and at least one protein reporter. In some embodiments of any of the aspects, the cargo of the saRNA encodes for and expresses at least one cargo protein and at least one expression-enhancing protein. In some embodiments of any of the aspects, the cargo of the saRNA encodes for and expresses at least one protein reporter and at least one expression-enhancing protein. In some embodiments of any of the aspects, the cargo of the saRNA encodes for and expresses at least one cargo protein, at least one protein reporters and at least one expression-enhancing protein.

[0467] In some embodiments of any of the aspects, the cargo protein is a chimeric antigen receptor. In some embodiments of any of the aspects, the expression enhancing protein is B18R. In some embodiments of any of the aspects, the expression enhancing protein is E3L. In some embodiments of any of the aspects, the expression enhancing protein is B18R and E3L.

[0468] In some embodiments of any of the aspects, an saRNA as described herein comprises a targeting domain to increase transfection efficiency of the saRNA into a specific cell type. In some embodiments of any of the aspects, a composition comprising an saRNA as described herein further comprises a targeting domain to increase transfection efficiency of the saRNA into a specific cell type.

### Definitions

[0469] The inventions illustratively described herein may be practiced in the absence of any element or elements, limitation or limitations which is not specifically disclosed herein. Thus, for example, the terms “comprising”, “including,” containing”, etc. shall be read expansively and without limitation. The terms and expressions which have been employed are used as terms of description and not of limitation, and there is no intention that in the use of such terms and expressions of excluding any equivalents of the features shown and described or portions thereof, but it is recognized that various modifications are possible within the scope of the invention claimed. Thus, it should be understood that although the present inventions have been specifically disclosed by preferred methods, embodiments and optional features, modification and variation of the concepts herein disclosed may be resorted to by those skilled in the art, and that such modifications and variations are considered to be within the scope of the inventions as defined by the embodiments and elsewhere in the invention. In the case of conflict, the specification, including definitions, will control.

[0470] The contents of the articles, patents, and patent applications, and all other documents and electronically available information mentioned or cited herein, are hereby incorporated by reference in their entirety to the same extent as if each individual publication was specifically and individually indicated to be incorporated by reference. Applicants reserve the right to physically incorporate into this application any and all materials and information from any such articles, patents, patent applications, or other documents.

[0471] Certain aspects and embodiments of the invention and inventions have been described broadly and generically herein. Each of the narrower species and subgeneric groupings falling within the generic invention also form part of some aspects and embodiments of inventions contemplated herein. This includes the generic description of inventions with a proviso or negative limitation removing any subject matter from the genus, regardless of whether or not the excised material is specifically recited herein.

[0472] For convenience, the meaning of some terms and phrases used in the invention, examples, and appended claims, are provided. Unless stated otherwise, or implicit from context, the following terms and phrases include the meanings provided below. The definitions are provided to aid in describing particular embodiments, and are not intended to limit the claimed technology, because the scope of the technology is limited only by the claims. Unless otherwise defined, all technical and scientific terms used herein have the same meaning as commonly understood by one of ordinary skill in the art to which this technology belongs. If there is an apparent discrepancy between the usage of a term in the art and its definition provided herein, the definition provided within the specification shall prevail.

[0473] The terms “protein”, “cargo”, or “protein of interest” refers to any genetically encodable polypeptide or nucleic acid sequence of known or unknown function. Examples of nucleic acid cargos of interest include non-coding RNA, long non-coding RNA, microRNA, and siRNA. Examples of poly peptide cargos of interest include receptors, ligands, enzymes, transmembrane receptors, transcription factors, viral components, etc. These are examples of proteins with known function and should not be interpreted as an exclusive list. Proteins with unknown function can also be genetically encoded.

[0474] The term “protein” refers to any genetically encodable polypeptide sequence of known or unknown function. Examples of proteins include receptors, ligands, enzymes, transcription factors, etc. These are examples of proteins with known function and should not be interpreted as an exclusive list. Proteins with unknown function can also be genetically encoded.

[0475] The term “cargo” refers to a polypeptide sequence that is encoded by conventional or self-replicating RNA. The polypeptide sequence can represent a polypeptide with known or unknown function. A non-exhaustive list of polypeptides that may be expressed by RNA include fluorescent proteins, enzymes, transcription factors, receptors, ligands, and antibodies.

[0476] Chimeric antigen receptors (CARs) combine components or functions of the T cell receptor (TCR) and associated molecules into a single polypeptide. In some embodiments of any of the aspects, the polypeptide described herein is a second or third generation CAR, which comprises an extracellular binding domain, a hinge region, a transmembrane domain, and one or more intracellular signaling domains. The extracellular binding domain typically contains a single-chain variable fragment (scFv) derived from antigen-reactive antibodies that usually have a high specificity to a specific antigen. Most CARs contain the CD3 zeta chain domain as the intracellular signaling domain, which is a primary transmitter of T cell activation signals. In addition to scFvs, non-antibody-based approaches have also been used to direct CAR specificity, usually taking advantage of ligand/receptor pairs that normally bind to each other. In some embodiments of any of the aspects, the polypeptide described herein can comprise cytokines, innate immune receptors, TNF receptors, growth factors, and structural proteins, which have all been successfully used as CAR antigen recognition domains.

[0477] The term “self-replicating RNA” refers to RNA strands that are known to undergo replication activity that results in replicate strands from an original strand. Self-replicating RNA is known to exist in the form of RNA viral genomes and artificial self-replicating RNA can be created by utilizing components from RNA viruses along with sequences of interest. The components from RNA viruses can be used in combination or from a particular RNA virus exclusively.

[0478] The term “self-amplifying RNA” refers to a polymer of nucleic acids that is capable of replication of the entire nucleic acid polymer in both the negative-strand and positive-strand conformations. It is capable of synthesizing additional self-amplifying RNA in part through production of various non-structural proteins of viral origin capable of acting as, among other activities, an RNA dependent RNA polymerase. Self-amplifying RNA can be created by utilizing components from RNA viruses along with sequence(s) that encode for cargo of interest. An integral aspect of saRNA is the ability for the non-structural proteins to generation both new full length saRNA strands, as well as RNA produced from a sub-genomic promoter. In therapeutic saRNA, the RNA produced by transcription from the sub-genomic protomer encodes for the cargo(s) of interest. Self-amplifying RNA, saRNA, self-replicating RNA, and srRNA may be used interchangeably throughout the entirety of the disclosure of this invention.

[0479] The term “expression” refers to the production of protein from an RNA strand. For example, “high expression” may refer to the production of a sufficient or large amount of protein. The level of expression desired is dependent on the application of interest. The terms “high expression” and “low expression” may be used in embodiments to describe observations made between cells of interest.

[0480] The term “expression” refers to the production of cargo from an RNA strand. In some embodiments, “expression” may refer to the production of protein to elicit the intended therapeutic effect. In some embodiments, “expression” may refer to the percentage of a cell population that expresses the cargo. In a preferred embodiment, “high expression” refers to over-production of the cargo of interest with respect to total amount. In another preferred embodiment, “high expression” refers to a percentage of a cell population that is equal to or greater than the control that is expressing the cargo of interest. The terms “high expression” and “low expression” may be used in embodiments to compare cargo expression with respect to total amount or percentage of cell expression, between cells of interest.

[0481] The term “conventional mRNA” refers to messenger RNA that does not have self-replicating functions. In some embodiments, conventional mRNA is generated by in vitro transcription. In some embodiments, conventional mRNA contains a 5′ cap structure and a poly-A tail. In some embodiments, conventional mRNA contains 5′ and 3′ untranslated regions.

[0482] The term “transfection” or “delivery” refers to the introduction of exogenous RNA into the intracellular space of cells. In some embodiments, transfection or delivery occurs by electroporation. In some embodiments, transfection or delivery is by lipid nanoparticles. In some embodiments, transfection or delivery occurs directly, without modification of the RNA or vehicle to carry the RNA. In some embodiments, transfection or delivery occurs through conjugation of cell-reactive or targeting moieties to the RNA.

[0483] The term “input” or “inputs” refers to a stimuli that interacts with the cargo of the self-replicating RNA. Input or inputs include, but are not limited to, a cell, a protein, an enzyme, a small molecule, a specific wavelength or wavelengths of light, a thermal stimuli, or application of a magnetic field. Input or inputs include, but are not limited to, a cell, a protein, an enzyme, a small molecule, DNA, RNA, a specific wavelength or wavelengths of light, a thermal stimuli, or application of a magnetic field.

[0484] The term “modified nucleotide” refers to any analog of cytidine, adenosine, guanosine, uridine, or pseudouridine. These analogs can include isomers of the nitrogenous base, as well as inclusion or exclusion of chemical groups, both natural occurring and synthetically introduced, on any aspect of the nitrogenous base. It is explicitly stated herein that modifications to the sugar-phosphate backbone are not included in the definition of the term “modified nucleotide.” This exception is not meant to exclude the methylation at the 2′O position of the first and second initiating nucleotides, also referred to as Cap-1 and cap-2 structures.

[0485] The term “highly substituted” or “high substitution” refers to the replacement of the natural nucleotide with a high percentage of the corresponding analog. Where the high percentage is greater than 25%; where the percentage is greater than 30%, where the percentage is greater than 35%; where the percentage is greater than 40%; where the percentage is greater than 45%; where the percentage is greater than 50%; where the percentage is greater than 55%; where the percentage is greater than 60%; where the percentage is greater than 65%; where the percentage is greater than 70%; where the percentage is greater than 75%; where the percentage is greater than 80%; where the percentage is greater than 85%; where the percentage is greater than 90%; where the percentage is greater than 95%; where the percentage is 100%. Additionally, the terms “100% substitution”, “100% replaced”, “full substitution”, “fully substituted”, and “completely replaced” may be used interchangeably throughout the disclosure of this invention. Full substitution means that there is no presence of the given non-modified nucleotide in the synthesis or final product of the self-amplifying RNA. A given percentage of substitution means the fractional mixture of a given nucleotide that is comprised of analog and naturally occurring either cytidine, adenosine, guanosine, or uridine. In a preferred embodiment 50-100%, of one of a combination of 5-methyluridine, 5-methylcytidine, and 5-hydroxymethylcytidine is substituted into the saRNA. In a preferred embodiment, 50%-100% of one of a combination of 5-methyluridine, 5-methylcytidine, 5-hydroxymethyluridine, and 5-hydroxymethylcytidine is substituted into the saRNA. In a preferred embodiment, 100% of cytidine is replace by 5-methylcytidine, and the resulting composition of the fully substituted self-amplifying RNA is comprised entirely of adenosine, guanosine, uridine, and 5-methylcytidine, which expresses cargo at equivalent or greater levels than unmodified saRNA. In another preferred embodiment 100% of cytidine is replace by 5-hydroxymethylcytidine, and the resulting composition of the fully substituted self-amplifying RNA is adenosine, guanosine, uridine, and 5-hydroxymethylcytidine, which expresses cargo at equivalent or greater levels than unmodified saRNA. In another preferred embodiment 100% of uridine is replace by 5-methyluridine, and the resulting composition of the fully substituted self-amplifying RNA is adenosine, guanosine, cytidine, and 5-methyluridine, which expresses cargo at equivalent or greater levels than unmodified saRNA. In another preferred embodiment 100% of uridine is replace by 5-hydroxymethyluridine, and the resulting composition of the fully substituted self-amplifying RNA is adenosine, guanosine, cytidine, and 5-hydroxymethyluridine, which expresses cargo at equivalent or greater levels than unmodified saRNA.

[0486] The terms “decrease”, “reduced”, “reduction”, or “inhibit” are all used herein to mean a decrease by a statistically significant amount. In some embodiments, “reduce,” “reduction” or “decrease” or “inhibit” typically means a decrease by at least 10% as compared to a reference level (e.g. the absence of a given treatment or agent) and can include, for example, a decrease by at least about 10%, at least about 20%, at least about 25%, at least about 30%, at least about 35%, at least about 40%, at least about 45%, at least about 50%, at least about 55%, at least about 60%, at least about 65%, at least about 70%, at least about 75%, at least about 80%, at least about 85%, at least about 90%, at least about 95%, at least about 98%, at least about 99%, or more. As used herein, “reduction” or “inhibition” does not encompass a complete inhibition or reduction as compared to a reference level. “Complete inhibition” is a 100% inhibition as compared to a reference level. A decrease can be preferably down to a level accepted as within the range of normal, e.g., for an individual without a given disorder.

[0487] The terms “increased”, “increase”, “enhance”, or “activate” are all used herein to mean an increase by a statically significant amount. In some embodiments, the terms “increased”, “increase”, “enhance”, or “activate” can mean an increase of at least 10% as compared to a reference level, for example an increase of at least about 20%, or at least about 30%, or at least about 40%, or at least about 50%, or at least about 60%, or at least about 70%, or at least about 80%, or at least about 90% or up to and including a 100% increase or any increase between 10-100% as compared to a reference level, or at least about a 2-fold, or at least about a 3-fold, or at least about a 4-fold, or at least about a 5-fold or at least about a 10-fold increase, or any increase between 2-fold and 10-fold or greater as compared to a reference level. In the context of a marker or symptom, an “increase” is a statistically significant increase in such level.

[0488] As used herein, the terms “protein” and “polypeptide” are used interchangeably to designate a series of amino acid residues, connected to each other by peptide bonds between the alpha-amino and carboxy groups of adjacent residues. The terms “protein”, and “polypeptide” refer to a polymer of amino acids, including modified amino acids (e.g., phosphorylated, glycated, glycosylated, etc.) and amino acid analogs, regardless of its size or function. “Protein” and “polypeptide” are often used in reference to relatively large polypeptides, whereas the term “peptide” is often used in reference to small polypeptides, but usage of these terms in the art overlaps. The terms “protein” and “polypeptide” are used interchangeably herein when referring to a gene product and fragments thereof. Thus, exemplary polypeptides or proteins include gene products, naturally occurring proteins, homologs, orthologs, paralogs, fragments and other equivalents, variants, fragments, and analogs of the foregoing.

[0489] In the various embodiments described herein, it is further contemplated that variants (naturally occurring or otherwise), alleles, homologs, conservatively modified variants, and/or conservative substitution variants of any of the particular polypeptides described are encompassed. As to amino acid sequences, one of skill will recognize that individual substitutions, deletions or additions to a nucleic acid, peptide, polypeptide, or protein sequence which alters a single amino acid or a small percentage of amino acids in the encoded sequence is a “conservatively modified variant” where the alteration results in the substitution of an amino acid with a chemically similar amino acid and retains the desired activity of the polypeptide. Such conservatively modified variants are in addition to and do not exclude polymorphic variants, interspecies homologs, and alleles consistent with the disclosure.

[0490] A given amino acid can be replaced by a residue having similar physiochemical characteristics, e.g., substituting one aliphatic residue for another (such as Ile, Val, Leu, or Ala for one another), or substitution of one polar residue for another (such as between Lys and Arg; Glu and Asp; or Gln and Asn). Other such conservative substitutions, e.g., substitutions of entire regions having similar hydrophobicity characteristics, are well known. Polypeptides comprising conservative amino acid substitutions can be tested to confirm that a desired activity, e.g., activity and specificity of a native or reference polypeptide is retained.

[0491] Amino acids can be grouped according to similarities in the properties of their side chains (in A. L. Lehninger, in Biochemistry, second ed., pp. 73-75, Worth Publishers, New York (1975)): (1) non-polar: Ala (A), Val (V), Leu (L), Ile (I), Pro (P), Phe (F), Trp (W), Met (M); (2) uncharged polar: Gly (G), Ser (S), Thr (T), Cys (C), Tyr (Y), Asn (N), Gln (Q); (3) acidic: Asp (D), Glu (E); (4) basic: Lys (K), Arg (R), His (H). Alternatively, naturally occurring residues can be divided into groups based on common side-chain properties: (1) hydrophobic: Norleucine, Met, Ala, Val, Leu, Ile; (2) neutral hydrophilic: Cys, Ser, Thr, Asn, Gln; (3) acidic: Asp, Glu; (4) basic: His, Lys, Arg; (5) residues that influence chain orientation: Gly, Pro; (6) aromatic: Trp, Tyr, Phe. Non-conservative substitutions will entail exchanging a member of one of these classes for another class. Particular conservative substitutions include, for example; Ala into Gly or into Ser; Arg into Lys; Asn into Gln or into His; Asp into Glu; Cys into Ser; Gln into Asn; Glu into Asp; Gly into Ala or into Pro; His into Asn or into Gln; Ile into Leu or into Val; Leu into Ile or into Val; Lys into Arg, into Gln or into Glu; Met into Leu, into Tyr or into Ile; Phe into Met, into Leu or into Tyr; Ser into Thr; Thr into Ser; Trp into Tyr; Tyr into Trp; and/or Phe into Val, into Ile or into Leu.

[0492] In some embodiments, the polypeptide described herein (or a nucleic acid encoding such a polypeptide) can be a functional fragment of one of the amino acid sequences described herein. As used herein, a “functional fragment” is a fragment or segment of a polypeptide which retains at least 50% of the wild-type reference polypeptide's activity. A functional fragment can comprise conservative substitutions of the sequences disclosed herein.

[0493] In some embodiments, the polypeptide described herein can be a variant of a polypeptide sequence described herein. In some embodiments, the variant is a conservatively modified variant. Conservative substitution variants can be obtained by mutations of native nucleotide sequences, for example. A “variant,” as referred to herein, is a polypeptide substantially homologous to a native or reference polypeptide, but which has an amino acid sequence different from that of the native or reference polypeptide because of one or a plurality of deletions, insertions or substitutions. Variant polypeptide-encoding DNA sequences encompass sequences that comprise one or more additions, deletions, or substitutions of nucleotides when compared to a native or reference DNA sequence, but that encode a protein or fragment thereof that retains activity of the native or reference polypeptide. A wide variety of, for example, PCR-based, site-specific mutagenesis approaches are known in the art and can be applied by the ordinarily skilled artisan to generate and test artificial variants.

[0494] A variant amino acid or DNA sequence can be at least 80%, at least 85%, at least 90%, at least 91%, at least 92%, at least 93%, at least 94%, at least 95%, at least 96%, at least 97%, at least 98%, at least 99%, or more, identical to a native or reference sequence. The degree of homology (percent identity) between a native and a mutant sequence can be determined, for example, by comparing the two sequences using freely available computer programs commonly employed for this purpose on the world wide web (e.g. BLASTp or BLASTn with default settings).

[0495] A variant amino acid sequence can be at least 50%, at least 60%, at least 70%, at least 80%, at least 90%, at least 91%, at least 92%, at least 93%, at least 94%, at least 95%, at least 96%, at least 97%, at least 98%, at least 99%, or more, similar to a native or reference sequence. As used herein, “similarity” refers to an identical amino acid or a conservatively substituted amino acid, as described herein. Accordingly, the percentage of “sequence similarity” is the percentage of amino acids which is either identical or conservatively changed; e.g., “sequence similarity”=(% sequence identity)+(% conservative changes). It should be understood that a sequence that has a specified percent similarity to a reference sequence necessarily encompasses a sequence with the same specified percent identity to that reference sequence. The skilled person will be aware of various computer programs, using different mathematical algorithms, that are available to determine the identity or similarity between two sequences. For instance, use can be made of a computer program employing the Needleman and Wunsch algorithm (Needleman et al. (1970)); the GAP program in the Accelrys GCG software package (Accelerys Inc., San Diego U.S.A.); the algorithm of E. Meyers and W. Miller (Meyers et al. (1989)) which has been incorporated into the ALIGN program (version 2.0); or more preferably the BLAST (Basic Local Alignment Tool using default parameters); see e.g., U.S. Pat. No. 10,023,890, the content of which is incorporated by reference herein in its entirety.

[0496] As used herein, the phrase “maintains the same function”, when used in reference to an enzyme, catalyzes the same reaction as a reference enzyme.

[0497] Alterations of the native amino acid sequence can be accomplished by any of a number of techniques known to one of skill in the art. Mutations can be introduced, for example, at particular loci by synthesizing oligonucleotides containing a mutant sequence, flanked by restriction sites enabling ligation to fragments of the native sequence. Following ligation, the resulting reconstructed sequence encodes an analog having the desired amino acid insertion, substitution, or deletion. Alternatively, oligonucleotide-directed site-specific mutagenesis procedures can be employed to provide an altered nucleotide sequence having particular codons altered according to the substitution, deletion, or insertion required. A wide variety of, site-specific mutagenesis approaches, e.g., Kunkel's method, cassette mutagenesis, PCR site-directed mutagenesis (e.g., traditional PCR, primer extension, or inverse PCR), whole plasmid mutagenesis, in vivo site-directed mutagenesis, CRISPR/Cas-guided mutagenesis, are known in the art and can be applied by the ordinarily skilled artisan to introduce mutations into specific nucleic acid loci. Techniques for making such alterations are very well established and include, for example, those disclosed by Walder et al. (Gene 42:133, 1986); Bauer et al. (Gene 37:73, 1985); Craik (BioTechniques, Jan. 1985, 12-19); Smith et al. (Genetic Engineering: Principles and Methods, Plenum Press, 1981); Braman, Jeff, ed. (2002) In Vitro Mutagenesis Protocols, Methods in Molecular Biology, Vol. 182 (2nd ed.); Khudyakov and Fields (2002), Artificial DNA: Methods and Applications, CRC Press; Hsu et al. (2014), Cell 157 (6): 1262-78; Cerchione et al. (2020) PLOS ONE 15 (4): e0231716; and U.S. Pat. Nos. 4,518,584 and 4,737,462, which are herein incorporated by reference in their entireties. Any cysteine residue not involved in maintaining the proper conformation of the polypeptide also can be substituted, generally with serine, to improve the oxidative stability of the molecule and prevent aberrant crosslinking. Conversely, cysteine bond(s) can be added to the polypeptide to improve its stability or facilitate oligomerization.

[0498] As used herein, the term “nucleic acid” or “nucleic acid sequence” refers to any molecule, preferably a polymeric molecule, incorporating units of ribonucleic acid, deoxyribonucleic acid or an analog thereof. The nucleic acid can be either single-stranded or double-stranded. A single-stranded nucleic acid can be one nucleic acid strand of a denatured double-stranded DNA. Alternatively, it can be a single-stranded nucleic acid not derived from any double-stranded DNA. In one aspect, the nucleic acid can be DNA. In another aspect, the nucleic acid can be RNA. Suitable DNA can include, e.g., template DNA, plasmid DNA, vector DNA. Suitable RNA can include, e.g., saRNA, mRNA.

[0499] The term “expression” refers to the cellular processes involved in producing RNA and proteins and as appropriate, secreting proteins, including where applicable, but not limited to, for example, transcription, transcript processing, translation and protein folding, modification and processing. Expression can refer to the transcription and stable accumulation of sense (e.g., saRNA, mRNA) or antisense RNA derived from a nucleic acid fragment or fragments and/or to the translation of saRNA or mRNA into a polypeptide.

[0500] “Expression products” include RNA transcribed from a gene, and polypeptides obtained by translation of mRNA transcribed from a gene. The term “gene” refers to the nucleic acid sequence which is transcribed (DNA) to RNA in vitro or in vivo when operably linked to appropriate regulatory sequences. The gene may or may not include regions preceding and following a coding region, e.g. 5′ untranslated (5′UTR) or “leader” sequences and 3′ UTR or “trailer” sequences, as well as intervening sequences (introns) between individual coding segments (exons).

[0501] As used herein, the terms “treat,” “treatment,” “treating,” or “amelioration” refer to therapeutic treatments, wherein the object is to reverse, alleviate, ameliorate, inhibit, slow down or stop the progression or severity of a condition associated with a disease or disorder. The term “treating” includes reducing or alleviating at least one adverse effect or symptom of a condition, disease or disorder. Treatment is generally “effective” if one or more symptoms or clinical markers are reduced. Alternatively, treatment is “effective” if the progression of a disease is reduced or halted. That is, “treatment” includes not just the improvement of symptoms or markers, but also a cessation of, or at least slowing of, progress or worsening of symptoms compared to what would be expected in the absence of treatment. Beneficial or desired clinical results include, but are not limited to, alleviation of one or more symptom(s), diminishment of extent of disease, stabilized (i.e., not worsening) state of disease, delay or slowing of disease progression, amelioration or palliation of the disease state, remission (whether partial or total), and/or decreased mortality, whether detectable or undetectable. The term “treatment” of a disease also includes providing relief from the symptoms or side-effects of the disease (including palliative treatment).

[0502] As used herein, the term “pharmaceutical composition” refers to the active agent in combination with a pharmaceutically acceptable carrier e.g., a carrier commonly used in the pharmaceutical industry. The phrase “pharmaceutically acceptable” is employed herein to refer to those compounds, materials, compositions, and/or dosage forms which are, within the scope of sound medical judgment, suitable for use in contact with the tissues of human beings and animals without excessive toxicity, irritation, allergic response, or other problem or complication, commensurate with a reasonable benefit/risk ratio. In some embodiments of any of the aspects, a pharmaceutically acceptable carrier can be a carrier other than water. In some embodiments of any of the aspects, a pharmaceutically acceptable carrier can be a cream, emulsion, gel, liposome, nanoparticle, and/or ointment. In some embodiments of any of the aspects, a pharmaceutically acceptable carrier can be an artificial or engineered carrier, e.g., a carrier that the active ingredient would not be found to occur in or within nature.

[0503] As used herein, the term “administering,” refers to the placement of a saRNA, or a nucleic acid or cell or composition comprising an saRNA, as disclosed herein, into a subject by a method or route which results in at least partial delivery of the saRNA, or a nucleic acid or cell or composition comprising an saRNA, at a desired site. Pharmaceutical compositions comprising the saRNA, or a nucleic acid or cell or composition comprising an saRNA, as disclosed herein, can be administered by any appropriate route which results in an effective treatment in the subject. In some embodiments, administration comprises physical human activity, e.g., an injection, act of ingestion, an act of application, and/or manipulation of a delivery device or machine. Such activity can be performed, e.g., by a medical professional and/or the subject being treated.

[0504] As used herein, “contacting” refers to any suitable means for delivering, or exposing, an agent to at least one cell. Exemplary delivery methods include, but are not limited to, direct delivery to cell culture medium, transfection, transduction, perfusion, injection, or other delivery method known to one skilled in the art. In some embodiments, contacting comprises physical human activity, e.g., an injection; an act of dispensing, mixing, and/or decanting; and/or manipulation of a delivery device or machine.

[0505] In some embodiments of any of the aspects, the cells can be maintained in culture. As used herein, “maintaining” refers to continuing the viability of a cell or population of cells. A maintained population of cells will have at least a subpopulation of metabolically active cells.

[0506] As used herein, the term “specific binding” refers to a chemical or physical interaction between two molecules, compounds, cells and/or particles wherein the first entity binds to the second, target entity with greater specificity and affinity than it binds to a third entity which is a non-target. In some embodiments, specific binding can refer to an affinity of the first entity for the second target entity which is at least 10 times, at least 50 times, at least 100 times, at least 500 times, at least 1000 times or greater than the affinity for the third non-target entity. A reagent specific for a given target is one that exhibits specific binding for that target under the conditions of the assay being utilized.

[0507] As used herein, the term “analog” refers to a substance that shares one or more particular structural features, elements, components, or moieties with a reference substance. Typically, an “analog” shows significant structural similarity with the reference substance, for example sharing a core or consensus structure, but also differs in certain discrete ways. In some embodiments, an analog is a substance that can be generated from the reference substance, e.g., by chemical manipulation of the reference substance.

[0508] The term “statistically significant” or “significantly” refers to statistical significance and generally means a two standard deviation (2SD) or greater difference.

[0509] Other than in the operating examples, or where otherwise indicated, all numbers expressing quantities of ingredients or reaction conditions used herein should be understood as modified in all instances by the term “about.” The term “about” when used in connection with percentages can mean±1%.

[0510] As used herein, the term “comprising” means that other elements can also be present in addition to the defined elements presented. The use of “comprising” indicates inclusion rather than limitation.

[0511] The term “consisting of” refers to compositions, methods, and respective components thereof as described herein, which are exclusive of any element not recited in that description of the embodiment.

[0512] As used herein the term “consisting essentially of” refers to those elements required for a given embodiment. The term permits the presence of additional elements that do not materially affect the basic and novel or functional characteristic(s) of that embodiment of the invention.

[0513] The singular terms “a,” “an,” and “the” include plural referents unless context clearly indicates otherwise. Similarly, the word “or” is intended to include “and” unless the context clearly indicates otherwise. Although methods and materials similar or equivalent to those described herein can be used in the practice or testing of this disclosure, suitable methods and materials are described below. The abbreviation, “e.g.” is derived from the Latin exempli gratia, and is used herein to indicate a non-limiting example. Thus, the abbreviation “e.g.” is synonymous with the term “for example.”

[0514] Groupings of alternative elements or embodiments of the invention disclosed herein are not to be construed as limitations. Each group member can be referred to and claimed individually or in any combination with other members of the group or other elements found herein. One or more members of a group can be included in, or deleted from, a group for reasons of convenience and/or patentability. When any such inclusion or deletion occurs, the specification is herein deemed to contain the group as modified thus fulfilling the written description of all Markush groups used in the appended claims.

[0515] Unless otherwise defined herein, scientific and technical terms used in connection with the present application shall have the meanings that are commonly understood by those of ordinary skill in the art to which this disclosure belongs. It should be understood that this invention is not limited to the particular methodology, protocols, and reagents, etc., described herein and as such can vary. The terminology used herein is for the purpose of describing particular embodiments only, and is not intended to limit the scope of the present invention, which is defined solely by the claims. Definitions of common terms in cell biology, immunology, and molecular biology can be found in The Merck Manual of Diagnosis and Therapy, 20th Edition, published by Merck Sharp & Dohme Corp., 2018 (ISBN 0911910190, 978-0911910421); Robert S. Porter et al. (eds.), The Encyclopedia of Molecular Cell Biology and Molecular Medicine, published by Blackwell Science Ltd., 1999-2012 (ISBN 9783527600908); and Robert A. Meyers (ed.), Molecular Biology and Biotechnology: a Comprehensive Desk Reference, published by VCH Publishers, Inc., 1995 (ISBN 1-56081-569-8); Immunology by Werner Luttmann, published by Elsevier, 2006; Janeway's Immunobiology, Kenneth Murphy, Allan Mowat, Casey Weaver (eds.), W. W. Norton & Company, 2016 (ISBN 0815345054, 978-0815345053); Lewin's Genes XI, published by Jones & Bartlett Publishers, 2014 (ISBN-1449659055); Michael Richard Green and Joseph Sambrook, Molecular Cloning: A Laboratory Manual, 4th ed., Cold Spring Harbor Laboratory Press, Cold Spring Harbor, N.Y., USA (2012) (ISBN 1936113414); Davis et al., Basic Methods in Molecular Biology, Elsevier Science Publishing, Inc., New York, USA (2012) (ISBN 044460149X); Laboratory Methods in Enzymology: DNA, Jon Lorsch (ed.) Elsevier, 2013 (ISBN 0124199542); Current Protocols in Molecular Biology (CPMB), Frederick M. Ausubel (ed.), John Wiley and Sons, 2014 (ISBN 047150338X, 9780471503385), Current Protocols in Protein Science (CPPS), John E. Coligan (ed.), John Wiley and Sons, Inc., 2005; and Current Protocols in Immunology (CPI) (John E. Coligan, ADA M Kruisbeek, David H Margulies, Ethan M Shevach, Warren Strobe, (eds.) John Wiley and Sons, Inc., 2003 (ISBN 0471142735, 9780471142737), the contents of which are all incorporated by reference herein in their entireties.

[0516] Other terms are defined herein within the description of the various aspects of the invention.

[0517] All patents and other publications; including literature references, issued patents, published patent applications, and co-pending patent applications; cited throughout this application are expressly incorporated herein by reference for the purpose of describing and disclosing, for example, the methodologies described in such publications that might be used in connection with the technology described herein. These publications are provided solely for their disclosure prior to the filing date of the present application. Nothing in this regard should be construed as an admission that the inventors are not entitled to antedate such disclosure by virtue of prior invention or for any other reason. All statements as to the date or representation as to the contents of these documents is based on the information available to the applicants and does not constitute any admission as to the correctness of the dates or contents of these documents.

[0518] The description of embodiments of the disclosure is not intended to be exhaustive or to limit the disclosure to the precise form disclosed. While specific embodiments of, and examples for, the disclosure are described herein for illustrative purposes, various equivalent modifications are possible within the scope of the disclosure, as those skilled in the relevant art will recognize. For example, while method steps or functions are presented in a given order, alternative embodiments may perform functions in a different order, or functions may be performed substantially concurrently. The teachings of the disclosure provided herein can be applied to other procedures or methods as appropriate. The various embodiments described herein can be combined to provide further embodiments. Aspects of the disclosure can be modified, if necessary, to employ the compositions, functions and concepts of the above references and application to provide yet further embodiments of the disclosure. Moreover, due to biological functional equivalency considerations, some changes can be made in protein structure without affecting the biological or chemical action in kind or amount. These and other changes can be made to the disclosure in light of the detailed description. All such modifications are intended to be included within the scope of the appended claims.

[0519] Specific elements of any of the foregoing embodiments can be combined or substituted for elements in other embodiments. Furthermore, while advantages associated with certain embodiments of the disclosure have been described in the context of these embodiments, other embodiments may also exhibit such advantages, and not all embodiments need necessarily exhibit such advantages to fall within the scope of the disclosure.

[0520] Some embodiments of the technology described herein can be defined according to any of the following numbered paragraphs:
[0521] 1. A method whereby self-replicating RNA is used to express a protein or multiple proteins at a level comparable to other methods used to establish constitutive protein expression.
[0522] 2. A method of paragraph 1, wherein the self-replicating components are derived from the Venezuela Equine Encephalitis Virus (VEEV), Semliki Forest Virus (SFV), Sindbis Virus (SIN), Kunjin Virus (KUN), Measles virus (MV), Rabies virus (RABV), or Vesicular Stomatitis virus (VSV).
[0523] 3. A method wherein self-replicating RNA and one or multiple input(s) controls the fate or function of a cell.
[0524] 4. A method of paragraph 3, wherein the input is endogenous to the environment of the cell containing self-replicating RNA; wherein the input is exogenous to the environment of the cell containing self-replicating RNA.
[0525] 5. A method of paragraph 3, wherein the input is a cell; wherein the input is a protein; wherein the input is a small molecule; wherein the input is a specific wavelength or wavelengths of light; wherein the input is temperature; wherein the input is application of a magnetic field.
[0526] 6. A method of paragraph 3, wherein the input results in the death, increased clearance rate, or cell-cycle arrest of a cell containing the self-replicating RNA.
[0527] 7. A method of paragraph 3, wherein the input results in inhibition of a protease domain comprising an aspect of the cargo; wherein the input results in the activation of a protease domain comprising an aspect of the cargo.
[0528] 8. A method of paragraph 3, wherein the input results in oligomerization and a resultant activation of the cargo; wherein the input results in oligomerization and a resultant inhibition of the cargo.
[0529] 9. A method of paragraph 3, wherein the cargo comprises a chimeric antigen receptor; wherein the cargo comprises multiple chimeric antigen receptors.
[0530] 10. A method of paragraph 3, wherein control of the cell requires the presence of all inputs simultaneously; wherein control of the cell requires the presence of any input; wherein control of the cell requires both the presence and absence of a distinct combination of inputs.
[0531] 11. A method of paragraph 3, wherein the function alters cell type; wherein the function is localization; wherein the function is lytic; wherein the function is stimulatory; wherein the function is immunomodulatory
[0532] 12. A self-replicating RNA of paragraph 3, wherein the cargo protein comprises a chimeric antigen receptor that contains an extracellular domain that sense input signals.
[0533] 13. A self-replicating RNA of paragraph 3, wherein the cargo proteins are chimeric antigen receptors, and the input signal is a small molecule and/or a protein.
[0534] 14. A self-replicating RNA of paragraph 3, wherein the cargo proteins have a domain or domains responsive to an external input.
[0535] 15. A self-replicating RNA of paragraph 3, wherein the cargo proteins include protease domains that respond to protease inhibitors to regulate activity.
[0536] 16. A method of paragraph 3, wherein self-replicating RNA is delivered in situ; wherein the self-replicating RNA is delivered ex vivo.
[0537] 17. A method whereby self-replicating RNA is used to express cargo proteins along with additional protein reporters or expression enhancing proteins.
[0538] 18. A self-replicating RNA according to paragraph 17, wherein the cargo protein is a chimeric antigen receptor and the expression enhancing protein is B18R.
[0539] 19. A self-replicating RNA according to paragraph 17, wherein the cargo protein is a chimeric antigen receptor and the expression enhancing protein is E3L.
[0540] 20. A method to manufacture cells with controllable activity by delivery of self-replicating RNA by electroporation.
[0541] 21. A method to manufacture cells with controllable activity by delivery of self-replicating RNA by lipid nanoparticles.
[0542] 22. A lipid nanoparticle according to paragraph 21, wherein an targeting domain is attached to the surface that has the purpose of increasing transfection efficiency of a desired cell type.
[0543] 23. A method to increase the level of expression of a cargo protein in a cell by expressing the cargo protein by self-replicating RNA.
[0544] 24. A method to control the activity of a protein that is expressed by self-replicating RNA by administration of a small molecule and/or protein and/or RNA (aptamer).
[0545] 25. A self-replicating RNA according to paragraphs 16 and 17, wherein the protein is a chimeric antigen receptor, and the activity is regulated by small molecule responsive domains.
[0546] 26. A method to increase and decrease the activity of a protein that is expressed by self-replicating RNA by administration of distinct small molecules.
[0547] 27. A method according to paragraph 19, wherein the small molecules are protease inhibitors or molecules known to interact with specified protein domains.
[0548] 28. A method for expressing proteins that can interact with each other by self-replicating RNA.
[0549] 29. A method for expressing proteins that can interact with each other in a manner resulting in conditional activity of the transfected cell by self-replicating RNA.
[0550] 30. A self-replicating RNA according to paragraph 22, wherein the proteins are chimeric antigen receptors with activating and inhibitory functions.
[0551] 31. A method for generating cells with controllable functions by delivering multiple distinct self-replicating RNAs to a mixture of cells.
[0552] 32. A method to administer one or more cell types modified with self-replicating RNA to a patient via intraosseous (IO), intraperitoneal (IP), subcutaneous (SC), intravenous (IV), intramuscular (IM), intrarectal, intravaginal, and intraarticular (IA) or via inhalation or topically.

[0553] Some embodiments of the technology described herein can be defined according to any of the following numbered paragraphs:
[0554] 1. A self-amplifying RNA (saRNA) encoding a cargo of interest, the saRNA comprising a level of substitution of a given nucleotide with a modified nucleotide greater than 25%, where the modified nucleotide is selected from the group consisting of 5-methylcytidine, 5-methyluridine, and 5-hydroxymethylcytidine, and optionally the saRNA expresses the cargo at a level greater than or equal to that of the same saRNA without the modified nucleotide.
[0555] 2. A self-amplifying RNA (saRNA), encoding a cargo of interest, the saRNA comprising a level of substitution of a given nucleotide with a modified nucleotide greater than 25%, where the modified nucleotide is comprised of a pyrimidine nucleoside triphosphate with a moiety on the 5 carbon, wherein the moiety is selected from a list comprising methyl, ethyl, propyl, trifluoromethyl, hydroxymethyl, hydroxyethyl, or hydroxypropyl functional groups, and optionally the saRNA expresses the cargo at a level greater than or equal to that of the same saRNA without the modified nucleotide.
[0556] 3. The saRNA of paragraph 1 or 2, wherein the substitution ratio is 25-50%; is 51-75%; is 75-99%; is 100%.
[0557] 4. The saRNA of paragraph 1, wherein substitution with 5-methyluridine and one or both, 5-methylcytidine and 5-hydroxymethylcytidine, occurs in the same saRNA molecule. A composition of paragraph 1 or 2, wherein the initiating nucleotide, the nucleotide directly proximal to the 5′ cap, is an adenosine or adenosine analog.
[0558] 5. The saRNA of paragraph 1 or 2, wherein the initiating nucleotide, the nucleotide directly proximal to the 5′ cap, is a guanosine or guanosine analog.
[0559] 6. The saRNA of paragraph 1 or 2, wherein the initiating nucleotide, and optionally the subsequent nucleotide, of the saRNA is methylated at the 2′O position of the ribose.
[0560] 7. The saRNA of paragraph 1 or 2, wherein the saRNA contains components derived from the Venezuela Equine Encephalitis Virus (VEEV), Semliki Forest Virus (SFV), Sindbis Virus (SIN), Kunjin Virus (KUN), Measles virus (MV), Coronavirus (CoV), Rabies virus (RABV), or Vesicular Stomatitis virus (VSV).
[0561] 8. The saRNA of any one of paragraphs 1-7, wherein the saRNA expresses a cargo that is a protein or multiple proteins of viral, bacterial, protozoan, mammalian, or plant in origin.
[0562] 9. The saRNA of any one of paragraphs 1-7, wherein the saRNA expresses a chimeric antigen receptor containing an extracellular domain that senses input signals.
[0563] 10. The saRNA of any one of paragraphs 1-7, wherein the saRNA expresses a ligand, a cell surface receptor, a transcription factor, a cytokine, a chemokine, an enzyme, an antibody, or other protein with biological activity.
[0564] 11. The saRNA of any one of paragraphs 1-7, wherein the saRNA expresses cargo or cargos of interest comprising a domain or domains responsive to an external input.
[0565] 12. The saRNA of any one of paragraphs 1-7, wherein the saRNA transcribes one or multiple non-coding RNA selected from a list comprising siRNA, shRNA, or microRNA.
[0566] 13. The saRNA of any one of paragraphs 1-7, wherein the cargo of interest is one or multiple vaccine associated antigens, wherein the vaccine associated antigen is one or multiple proteins encoded on the genomes of viruses selected from a list comprising respiratory syncytial virus, hemagglutinin virus, human immunodeficiency virus, influenza virus, zika virus, sudden acute respiratory syndrome coronavirus 2, human papillomavirus, herpes virus, rotavirus, chicken pox, dengue virus, hepatitis A virus, hepatitis virus B, rubella virus, poliovirus, or rabies virus.
[0567] 14. The saRNA of any one of paragraphs 1-7, wherein the cargo or cargos encoded by the saRNA is one or more chimeric antigen receptors selected from the list comprising CD19, CD22, CD30, b-cell maturation antigen (BCMA), disialoganglioside GD2, human estrogen receptor 2 (HER2), GPR87, Fibroblast Activator Protein (FAP), CD20, receptor tyrosine kinase-like orphan receptor 1 (ROR1), carcinoembryonic antigen (CEA), mesothelin (MSLN), prostate-specific membrane antigen (PSMA), EGFRvIII, IL13Rα2, NKG2D.
[0568] 15. The saRNA of any one of paragraphs 1-7, wherein the cargo or cargos encoded by the saRNA is one or more transcription factor, including those selected from the list Oct3/4, Sox2, Klf4, & c-Myc.
[0569] 16. The saRNA of any one of paragraphs 1-7, wherein the cargo or cargos encoded by the saRNA is one or more growth factor or cytokine, selected from the list comprising platelet-derived growth factor (PDGF), erythropoietin (EPO), vascular endothelial growth factor (VEGF), transforming growth factor-β1 (TGF-β1), fibroblast growth factor (FGF), human relaxin-2 (RLX2), alpha-melanocyte-stimulating hormone (alpha-MSH), insulin-like growth factor-I (IGF-I), epidermal growth factor (EGF), nerve growth factor (NGF), granulocyte-monocyte colony-stimulating factor (GMCSF), Thrombopoietin (TPO), Bone morphogenic protein (BMP), hepatocyte growth factor (HGF), growth/differentiation factor (GDF), Neurotrophins, migration stimulating factor (MSF), sarcoma growth factor (SGF).
[0570] 17. The saRNA of any one of paragraphs 1-7, wherein the cargo or cargos encoded by the saRNA is one or both Pappalysin-A1 (PAPPA1) and Pappalysin-A2 (PAPPA2).
[0571] 18. The saRNA of any one of paragraphs 1-7, wherein the cargo or cargos encoded by the saRNA is one or more interleukin(s) or their cognate receptors and receptor sub-units, selected from the list comprising IL-2, IL-4, IL-7, IL-10, IL-13, and IL-15.
[0572] 19. The saRNA of any one of paragraphs 1-7, wherein the cargo or cargos encoded by the saRNA is one or more enzyme with antioxidant activity, selected from a list comprising phospholipid hydroperoxide glutathione peroxidase, superoxide dismutase-1, and superoxide dismutase-2; Bruton's tyrosine kinase; adenosine deaminase; ecto-nucleoside triphosphate diphosphydrolase.
[0573] 20. A pharmaceutical composition comprising a saRNA of any one of paragraphs 1-19 and a pharmaceutically acceptable carrier.
[0574] 21. A cell transfected with a saRNA of any one of paragraphs 1-19.
[0575] 22. The method of expressing a cargo encoded on a saRNA, the method comprising expressing in a cell (e.g. a eukaryotic cell) from a saRNA of any one of paragraphs 1-19.
[0576] 23. The method of expressing one or more preselected cargos in a subject in need thereof, the method comprising administering to a subject (e.g., a human, a livestock) an effective amount of a pharmaceutical composition of paragraph 20.
[0577] 24. The method of paragraph 22 or 23, wherein the saRNA maintains or increases initial saRNA replication and cargo expression compared to an unmodified saRNA of the same dose.
[0578] 25. The method of any one of paragraphs 22-24, wherein the expression of the cargo or cargos of interest encoded by a saRNA is equivalent or increased compared to that of an unmodified saRNA.
[0579] 26. The method of any one of paragraphs 22-25, wherein the transfection efficiency of a self-amplifying RNA molecule is increased compared to that of an unmodified saRNA.
[0580] 27. The method of any one of paragraphs 22-26, wherein the early interferon response resulting from introduction of the saRNA is decreased compared to that of unmodified saRNA.
[0581] 28. The method of any one of paragraphs 22-27, wherein the length of time over which cargo is expressed at a detectable level from the saRNA is increased compared to that of unmodified saRNA.
[0582] 29. The method of any one of paragraphs 22-28, wherein the cell is a human cell.
[0583] 30. The method of any one of paragraphs 22-29, wherein the subject has cancer.
[0584] 31. The method of any one of paragraphs 22-29, wherein the subject is in need of vaccination.
[0585] 32. The method of any one of paragraphs 22-29, wherein the subject is in need of protein replacement therapy.
[0586] 33. The method of any one of paragraphs 22-29, wherein the subject is in need of antibody therapy.
[0587] 34. The method of any one of paragraphs 22-33, wherein the saRNA permits tissue, organ, or cell-type specific expression of the cargo.
[0588] 35. A method of paragraph 34, wherein the saRNA comprises greater than 50% substitution of uridine with 5-methyluridine to facilitate kidney specific expression of the cargo.
[0589] 36. The method of any one of paragraphs 22-34, wherein the saRNA modulates cellular differentiation of a cell containing the saRNA at a level equivalent to or greater than the level of modulation achieved with the unmodified saRNA at an equivalent dose.
[0590] 37. The method of paragraph 36, wherein the cell is modulated by expression of a transcription factor encoded by the saRNA to become a stem cell.

[0591] Some embodiments of the technology described herein can be defined according to any of the following numbered paragraphs:
[0592] 1. A self-amplifying RNA (saRNA) comprising at least 25% modified nucleotides, wherein the modified nucleotides comprise a pyrimidine nucleoside phosphate with a moiety on carbon 5 of the pyrimidine, wherein the moiety is selected from the group consisting of methyl, ethyl, propyl, trifluoromethyl, hydroxymethyl, hydroxyethyl, and hydroxypropyl functional groups, and at least one cargo of interest.
[0593] 2. The saRNA of paragraph 1, wherein the modified nucleotides comprise 5-methylcytidine, 5-methyluridine, 5-hydroxymethyluridine, 5-hydroxymethylcytidine or a combination thereof.
[0594] 3. The saRNA of paragraph 1, wherein the saRNA expresses the cargo at a level greater than or equal to that of a corresponding saRNA with less than 25% modified nucleotides.
[0595] 4. The saRNA of paragraph 1, wherein the level of substitution of the modified nucleotides is: 25%-50%; 51%-75%; 75%-99%; 99.1%-99.9%; or 100%.
[0596] 5. The saRNA of paragraph 1, wherein the initiating nucleotide comprises:
   [0597] (a) an adenosine or adenosine analog, and wherein the initiating nucleotide of the saRNA is methylated at the 2′O position of the ribose (Cap1);
   [0598] (b) an adenosine or adenosine analog, and wherein the initiating nucleotide and the subsequent nucleotide of the saRNA are both methylated at the 2′O position of the ribose (Cap2);
   [0599] (c) a guanosine or guanosine analog, and wherein the initiating nucleotide of the saRNA is methylated at the 2′O position of the ribose (Cap1); or
   [0600] (d) a guanosine or guanosine analog, and wherein the initiating nucleotide and the subsequent nucleotide of the saRNA are both methylated at the 2′O position of the ribose (Cap2).
[0601] 6. The saRNA of paragraph 1 comprising from 5′ to 3′:
   [0602] (a) a 5′ cap;
   [0603] (b) non-structural protein 1 (nsp1), non-structural protein 2 (nsp2), non-structural protein 3 (nsp3), and/or non-structural protein 4 (nsp4), each derived from at least one virus;
   [0604] (c) a subgenomic promoter (SGP) derived from at least one virus;
   [0605] (d) 5′ untranslated region (UTR) derived from at least one virus;
   [0606] (e) the at least one cargo of interest;
   [0607] (f) a 3′ untranslated region (UTR) derived from at least one virus; and
   [0608] (g) a poly-A tail.
[0609] 7. The saRNA of paragraph 1, further comprising at least one 5′ conserved sequence element (CSE) and/or 3′ at least one conserved sequence element (CSE) derived from at least one virus.
[0610] 8. The saRNA of paragraph 6, wherein the at least one virus is an alphavirus.
[0611] 9. The saRNA of paragraph 6, wherein the at least one virus is selected from the group consisting of: Venezuela Equine Encephalitis Virus (VEEV), Semliki Forest Virus (SFV), Sindbis Virus (SIN), Chikungunya Virus (CHIKV), Eastern Equine Encephalitis Virus (EEEV), Mayaro Virus (MAYV), Getah Virus (GETV), Ross River Virus (RRV), Una Virus (UNAV), Middleburg Virus (MIDV), O'nyong nyong virus (ONNV), Barmah Forest Virus (BFV), Mucambo Virus (MUCV), Tonate Virus (TONV), Everglades Virus (EVEV), Rio Negro Virus (RNV), Turnip Rosette Virus (TROV), Highlands J Virus (HJV), Western Equine Encephalitis Virus (WEEV), Fig Mosaic Emaravirus (FMV), Aura Virus (AURAV), Kunjin Virus (KUN), Measles virus (MV), Coronavirus (CoV), Rabies virus (RABV), and Vesicular Stomatitis virus (VSV).
[0612] 10. The saRNA of paragraph 1, wherein the cargo comprises a chimeric antigen receptor (CAR) comprising an extracellular domain that specifically binds to an antigen of interest.
[0613] 11. The saRNA of paragraph 10, wherein the antigen of interest for the CAR is selected from the group consisting of: CD19, CD22, CD30, b-cell maturation antigen (BCMA), disialoganglioside GD2, human estrogen receptor 2 (HER2), G protein-coupled receptor 87 (GPR87), Fibroblast Activator Protein (FAP), CD20, receptor tyrosine kinase-like orphan receptor 1 (ROR1), carcinoembryonic antigen (CEA), mesothelin (MSLN), prostate-specific membrane antigen (PSMA), epidermal growth factor receptor variant III (EGFRvIII), Interleukin 13 receptor alpha 2 (IL13Rα2), and natural killer group 2 member D (NKG2D).
[0614] 12. The saRNA of paragraph 10, wherein the CAR is selected from the group consisting of:
   [0615] (a) a conventional CAR;
   [0616] (b) an ON-CAR;
   [0617] (c) an OFF-CAR system;
   [0618] (d) an ON/OFF-CAR;
   [0619] (e) an inhibitory CAR; or
   [0620] (f) a split, universal, programmable and reconfigurable (SUPRA) CAR system.
[0621] 13. The saRNA of paragraph 1, wherein the cargo comprises a ligand, a cell surface receptor, a transcription factor, a cytokine, a chemokine, an enzyme, and/or an antibody or fragment thereof.
[0622] 14. The saRNA of paragraph 13, wherein the antibody is a bispecific antibody.
[0623] 15. The saRNA of paragraph 1, wherein the cargo comprises a bispecific T cell engager (BiTE).
[0624] 16. The saRNA of paragraph 1, wherein the cargo comprises at least one non-coding RNA selected from the group consisting of siRNA, shRNA, and microRNA.
[0625] 17. The saRNA of paragraph 1, wherein the cargo comprises at least one vaccine-associated antigen comprising at least one protein encoded by a genome of a virus.
[0626] 18. The saRNA of paragraph 17, wherein the virus is selected from the group consisting of: Rift valley fever, Crimean-Congo haemorrhagic fever, Lassa fever, Chikungunya Virus (CHIKV), Nipah Virus (NiV), respiratory syncytial virus (RSV), Ebola virus, Marburg virus, West Nile virus, Venezuela equine encephalitis, yellow fever virus, Japanese encephalitis virus, western equine encephalitis virus, eastern equine encephalitis, cytomegalovirus (CMV), human immunodeficiency virus (HIV), influenza virus, Zika virus, middle eastern respiratory syndrome coronavirus (MERS-CoV), severe acute respiratory syndrome coronavirus (SARS-CoV), severe acute respiratory syndrome coronavirus 2 (SARS-CoV-2), human papillomavirus (HPV), herpes virus, rotavirus, varicella-zoster virus (VZV), dengue virus, hepatitis A virus, hepatitis B virus, rubella virus, poliovirus, and rabies virus.
[0627] 19. The saRNA of paragraph 1, wherein the cargo comprises at least one transcription factor selected from the group consisting of Octamer-Binding Transcription Factor 3 (Oct3, Oct4), Sex-Determining Region Y (SRY)-Box Transcription Factor 2 (Sox2), Kruppel-Like Factor 4 (Klf4), and cellular myelocytomatosis oncogene (c-Myc).
[0628] 20. The saRNA of paragraph 1, wherein the cargo comprises at least one growth factor and/or cytokine selected from the group consisting of platelet-derived growth factor (PDGF), erythropoietin (EPO), vascular endothelial growth factor (VEGF), transforming growth factor-β1 (TGF-β1), fibroblast growth factor (FGF), human relaxin-2 (RLX2), alpha-melanocyte-stimulating hormone (alpha-MSH), insulin-like growth factor-I (IGF-I), epidermal growth factor (EGF), nerve growth factor (NGF), granulocyte-monocyte colony-stimulating factor (GMCSF), Thrombopoietin (TPO), Bone morphogenic protein (BMP), hepatocyte growth factor (HGF), growth/differentiation factor (GDF), a Neurotrophin, migration stimulating factor (MSF), and sarcoma growth factor (SGF); or wherein the cargo comprises one or both of Pappalysin-A1 (PAPPA1) and Pappalysin-A2 (PAPPA2).
[0629] 21. The saRNA of paragraph 1, wherein the cargo comprises at least one interleukin and/or a cognate receptor(s) of the interleukin and/or receptor sub-units for the interleukin, wherein the interleukin is selected from the group consisting of IL-2, IL-4, IL-7, IL-10, IL-12, IL-13, and IL-15.
[0630] 22. The saRNA of paragraph 1, wherein the cargo comprises at least one enzyme with antioxidant activity, wherein the enzyme is selected from the group consisting of phospholipid hydroperoxide glutathione peroxidase, superoxide dismutase-1, superoxide dismutase-2, Bruton's tyrosine kinase, adenosine deaminase, and ecto-nucleoside triphosphate diphosphydrolase.
[0631] 23. The saRNA of paragraph 1, wherein the cargo comprises glucagon-like peptide-1 (GLP-1) or a fragment thereof.
[0632] 24. A self-amplifying RNA (saRNA) comprising from 5′ to 3′:
   [0633] (a) a 5′ cap;
   [0634] (b) non-structural protein 1 (nsp1), non-structural protein 2 (nsp2), non-structural protein 3 (nsp3), and/or non-structural protein 4 (nsp4), each derived from at least one virus;
   [0635] (c) a subgenomic promoter (SGP) derived from at least one virus;
   [0636] (d) a 5′ untranslated region (UTR) derived from at least one virus;
   [0637] (e) at least one cargo of interest;
   [0638] (f) a 3′ untranslated region (UTR) derived from at least one virus; and
   [0639] (g) a poly-A tail.
[0640] 25. A nucleic acid, vector, or cell encoding or comprising the saRNA of paragraph 1.
[0641] 26. A pharmaceutical composition comprising the saRNA of paragraph 1 and a pharmaceutically acceptable carrier.
[0642] 27. A method of expressing at least one cargo of interest in a cell, the method comprising contacting the cell with the saRNA of paragraph 1.
[0643] 28. The method of paragraph 27, the method further comprising contacting the cell with at least one input to control the fate or function of the cell.
[0644] 29. A method of expressing at least one cargo in a subject in need thereof, the method comprising administering to the subject an effective amount of the pharmaceutical composition of paragraph 26.
[0645] 30. The method of paragraph 29, the method further comprising administering to the subject at least one input to control the fate or function of at least one cell in the subject.

[0646] Some embodiments of the technology described herein can be defined according to any of the following numbered paragraphs:
[0647] 1. A self-amplifying RNA (saRNA) comprising at least 25% modified nucleotides, wherein the modified nucleotides comprise a pyrimidine nucleoside phosphate with a moiety on carbon 5 of the pyrimidine, wherein the moiety is selected from the group consisting of methyl, ethyl, propyl, trifluoromethyl, hydroxymethyl, hydroxyethyl, and hydroxypropyl functional groups, and at least one cargo of interest.
[0648] 2. The saRNA of paragraph 1, wherein the modified nucleotides comprise 5-methylcytidine, 5-methyluridine, 5-hydroxymethyluridine, 5-hydroxymethylcytidine or a combination thereof.
[0649] 3. The saRNA of paragraphs 1 or 2, wherein the saRNA expresses the cargo at a level greater than or equal to that of a corresponding saRNA with less than 25% modified nucleotides.
[0650] 4. The saRNA of any one of paragraphs 1-3, wherein the pyrimidine comprises cytidine, and the modified nucleotide comprises 5-methylcytidine.
[0651] 5. The saRNA of any one of paragraphs 1-4, wherein the pyrimidine comprises cytidine, and the modified nucleotide comprises 5-hydroxymethylcytidine.
[0652] 6. The saRNA of any one of paragraphs 1-5, wherein the pyrimidine comprises uridine, and the modified nucleotide comprises 5-methyluridine.
[0653] 7. The saRNA of any one of paragraphs 1-6, wherein the pyrimidine comprises uridine, and the modified nucleotide comprises 5-hydroxymethyluridine.
[0654] 8. The saRNA of any one of paragraphs 1-7, wherein the level of substitution of the modified nucleotides is 25%-50%.
[0655] 9. The saRNA of any one of paragraphs 1-8, wherein the level of substitution of the modified nucleotides is 51%-75%.
[0656] 10. The saRNA of any one of paragraph 1-9, wherein the level of substitution of the modified nucleotides is 75%-99%.
[0657] 11. The saRNA of any of paragraphs 1-10, where the level of substitution of the modified nucleotides is 99.1%-99.9%.
[0658] 12. The saRNA of any one of paragraphs 1-11, wherein the level of substitution of the modified nucleotides is 100%.
[0659] 13. The saRNA of any one of paragraphs 1-12, wherein the modified nucleotides comprise 5-methyluridine or 5-hydroxymethyluridine, and one or both of 5-methylcytidine and 5-hydroxymethylcytidine, in the same saRNA molecule.
[0660] 14. The saRNA of any one of paragraphs 1-13, wherein the initiating nucleotide directly proximal to the 5′ cap in the saRNA comprises an adenosine or adenosine analog.
[0661] 15. The saRNA of any one of paragraphs 1-14, wherein the initiating nucleoside directly proximal to the 5′ cap in the saRNA comprises a guanosine or guanosine analog.
[0662] 16. The saRNA of any one of paragraphs 1-15, wherein the initiating nucleoside of the saRNA is methylated at the 2′O position of the ribose (Cap1).
[0663] 17. The saRNA of any one of paragraphs 1-16, wherein the initiating nucleotide and the subsequent nucleotide of the saRNA are both methylated at the 2′O position of the ribose (Cap2).
[0664] 18. The saRNA of any one of paragraphs 1-17, wherein the initiating nucleotide comprises an adenosine or adenosine analog, and wherein the initiating nucleotide of the saRNA is methylated at the 2′O position of the ribose (Cap1).
[0665] 19. The saRNA of any one of paragraphs 1-18, wherein the initiating nucleotide comprises an adenosine or adenosine analog, and wherein the initiating nucleotide and the subsequent nucleotide of the saRNA are both methylated at the 2′O position of the ribose (Cap2).
[0666] 20. The saRNA of any one of paragraphs 1-19, wherein the initiating nucleotide comprises a guanosine or guanosine analog, and wherein the initiating nucleotide of the saRNA is methylated at the 2′O position of the ribose (Cap1).
[0667] 21. The saRNA of any one of paragraphs 1-20, wherein the initiating nucleotide comprises a guanosine or guanosine analog, and wherein the initiating nucleotide and the subsequent nucleotide of the saRNA are both methylated at the 2′O position of the ribose (Cap2).
[0668] 22. The saRNA of any one of paragraphs 1-21, comprising from 5′ to 3′:
   [0669] (a) at least one non-structural protein derived from at least one virus;
   [0670] (b) a subgenomic promoter (SGP) derived from at least one virus; and
   [0671] (c) the at least one cargo of interest.
[0672] 23. The saRNA of any one of paragraphs 1-22, comprising from 5′ to 3′:
   [0673] (a) a 5′ cap;
   [0674] (b) non-structural protein 1 (nsp1), non-structural protein 2 (nsp2), non-structural protein 3 (nsp3), and/or non-structural protein 4 (nsp4), each derived from at least one virus;
   [0675] (c) a subgenomic promoter (SGP) derived from at least one virus;
   [0676] (d) 5′ untranslated region (UTR) derived from at least one virus;
   [0677] (e) the at least one cargo of interest;
   [0678] (f) a 3′ untranslated region (UTR) derived from at least one virus; and
   [0679] (g) a poly-A tail.
[0680] 24. The saRNA of any one of paragraphs paragraph 1-23, further comprising at least one 5′ conserved sequence element (CSE) and/or 3′ at least one conserved sequence element (CSE) derived from at least one virus.
[0681] 25. The saRNA of any one of paragraphs 1-24, wherein the nsp1, nsp2, nsp3, nsp4, SGP, 5′ UTR, 3′ UTR, 5′ CSE, and/or 3′ CSE are derived from the same virus.
[0682] 26. The saRNA of any one of paragraphs 1-25, wherein at least one of the nsp1, nsp2, nsp3, nsp4, SGP, 5′ UTR, 3′ UTR, 5′ CSE, and/or 3′ CSE are derived from different viruses.
[0683] 27. The saRNA of any one of paragraphs 1-26, wherein the virus is an alphavirus.
[0684] 28. The saRNA of any one of paragraphs 1-27, wherein the at least one virus is selected from the group consisting of: Venezuela Equine Encephalitis Virus (VEEV), Semliki Forest Virus (SFV), Sindbis Virus (SIN), Chikungunya Virus (CHIKV), Eastern Equine Encephalitis Virus (EEEV), Mayaro Virus (MAYV), Getah Virus (GETV), Ross River Virus (RRV), Una Virus (UNAV), Middleburg Virus (MIDV), O'nyong nyong virus (ONNV), Barmah Forest Virus (BFV), Mucambo Virus (MUCV), Tonate Virus (TONV), Everglades Virus (EVEV), Rio Negro Virus (RNV), Turnip Rosette Virus (TROV), Highlands J Virus (HJV), Western Equine Encephalitis Virus (WEEV), Fig Mosaic Emaravirus (FMV), Aura Virus (AURAV), Kunjin Virus (KUN), Measles virus (MV), Coronavirus (CoV), Rabies virus (RABV), and Vesicular Stomatitis virus (VSV).
[0685] 29. The saRNA of any one of paragraphs 1-28, wherein the alphavirus is selected from the group consisting of: Venezuela Equine Encephalitis Virus (VEEV), Semliki Forest Virus (SFV), Sindbis Virus (SIN), Chikungunya Virus (CHIKV), Eastern Equine Encephalitis Virus (EEEV), Mayaro Virus (MAYV), Getah Virus (GETV), Ross River Virus (RRV), Una Virus (UNAV), Middleburg Virus (MIDV), O'nyong nyong virus (ONNV), Barmah Forest Virus (BFV), Mucambo Virus (MUCV), Tonate Virus (TONV), Everglades Virus (EVEV), Rio Negro Virus (RNV), Highlands J Virus (HJV), Western Equine Encephalitis Virus (WEEV), and Aura Virus (AURAV).
[0686] 30. The saRNA of any one of paragraphs 1-29, wherein the saRNA expresses the cargo of interest.
[0687] 31. The saRNA of any one of paragraphs 1-30, wherein the cargo comprises at least one cargo protein or peptide.
[0688] 32. The saRNA of any one of paragraphs 1-31, wherein the cargo comprises at least two cargo proteins or peptides.
[0689] 33. The saRNA of paragraph 1-32, wherein the at least one cargo protein or peptide is viral, bacterial, protozoan, mammalian, or plant in origin.
[0690] 34. The saRNA of any one of paragraphs 1-33, wherein the cargo comprises a chimeric antigen receptor (CAR) comprising an extracellular domain that specifically binds to an antigen of interest.
[0691] 35. The saRNA of any one of paragraphs 1-34, wherein the antigen of interest for the CAR is selected from the group consisting of: CD19, CD22, CD30, b-cell maturation antigen (BCMA), disialoganglioside GD2, human estrogen receptor 2 (HER2), G protein-coupled receptor 87 (GPR87), Fibroblast Activator Protein (FAP), CD20, receptor tyrosine kinase-like orphan receptor 1 (ROR1), carcinoembryonic antigen (CEA), mesothelin (MSLN), prostate-specific membrane antigen (PSMA), epidermal growth factor receptor variant III (EGFRvIII), Interleukin 13 receptor alpha 2 (IL13Rα2), and natural killer group 2 member D (NKG2D).
[0692] 36. The saRNA of any one of paragraphs 1-35, wherein the CAR is selected from the group consisting of:
   [0693] (a) a conventional CAR;
   [0694] (b) an ON-CAR;
   [0695] (c) an OFF-CAR system;
   [0696] (d) an ON/OFF-CAR;
   [0697] (e) an inhibitory CAR; or
   [0698] (f) a split, universal, programmable and reconfigurable (SUPRA) CAR system.
[0699] 37. The saRNA of paragraph 36, wherein the conventional CAR comprises:
   [0700] (a) an extracellular binding domain;
   [0701] (b) a transmembrane domain; and
   [0702] (c) at least one intracellular signaling domain.
[0703] 38. The saRNA of paragraph 36, wherein the ON-CAR comprises:
   [0704] (a) an extracellular binding domain;
   [0705] (b) a transmembrane domain;
   [0706] (c) at least one intracellular signaling domain; and
   [0707] (d) a repressible protease domain that cleaves and degrades the ON-CAR in the absence of a protease inhibitor.
[0708] 39. The saRNA of paragraph 36, wherein the OFF-CAR system comprises:
   [0709] (a) a first polypeptide comprising:
      [0710] (i) an extracellular binding domain;
      [0711] (ii) a transmembrane domain; and
      [0712] (iii) a peptide domain; and
   [0713] (b) a second polypeptide comprising:
      [0714] (i) a repressible protease domain that can bind specifically to the peptide domain in the absence of a protease inhibitor; and
      [0715] (ii) at least one intracellular signaling domain.
[0716] 40. The saRNA of paragraph 39, wherein the peptide domain is selected from the group consisting of: K5-66, K5-66-A, K5-66-B, K6-10, K6-10A, K6-10B K5-66-R, CP5-46, CP5-46-4D5E, CP5-46-A, CP5-46A-4D5E, Ant-CP5-46A-4D5E, and apo NS3a reader (ANR) peptides.
[0717] 41. The saRNA of paragraph 36, wherein the ON/OFF-CAR comprises:
   [0718] (a) an extracellular binding domain;
   [0719] (b) a transmembrane domain;
   [0720] (c) at least one intracellular signaling domain;
   [0721] (d) a repressible protease domain that cleaves and degrades the ON/OFF-CAR in the absence of a protease inhibitor; and
   [0722] (e) a drug-inducible degron domain.
[0723] 42. The saRNA of any one of paragraphs 38, 39, or 41, wherein the repressible protease domain comprises hepatitis C virus (HCV) nonstructural protein 3 (NS3).
[0724] 43. The saRNA of any one of paragraphs 38, 39, or 41, wherein the protease inhibitor is selected from grazoprevir (GZV), danoprevir, simeprevir, asunaprevir, ciluprevir, boceprevir, sovaprevir, paritaprevir, ombitasvir, paritaprevir, ritonavir, dasabuvir, and telaprevir.
[0725] 44. The saRNA of paragraph 41, wherein the drug-inducible degron domain comprises an IKAROS family zinc finger 3 (IKZF3) domain capable of being bound and activated to degrade the CAR by the drug lenalidomide or pomalidomide.
[0726] 45. The saRNA of paragraph 36, wherein the inhibitory CAR comprises:
   [0727] (a) an extracellular binding domain;
   [0728] (b) a transmembrane domain; and
   [0729] (c) an inhibitory domain.
[0730] 46. The saRNA of paragraph 45, wherein the inhibitory domain comprises a Killer Cell Inhibitory Receptor (KIR) domain.
[0731] 47. The saRNA of paragraph 36, wherein the SUPRA CAR system comprises:
   [0732] (a) a first polypeptide comprising:
      [0733] (i) an extracellular binding domain; and
      [0734] (ii) a first member of an extracellular protein interaction domain; and
   [0735] (b) a second polypeptide comprising:
      [0736] (i) a second member of the extracellular protein interaction domain that can bind specifically with the first member of the extracellular protein interaction domain of the first polypeptide;
      [0737] (ii) a transmembrane domain; and
      [0738] (iii) at least one intracellular signaling domain.
[0739] 48. The saRNA of any one of paragraphs 37-47, wherein the intracellular signaling domain is selected from the group consisting of: TCRC; FcRy; FcRp; CD3zeta; CD3y; CD35; CD3s; CD3C; CD22; CD79a; CD79b; CD66d; CARD11; CD2; CD7; CD27; CD28; CD30; CD40; CD54 (ICAM); CD83; CD134 (OX40); CD137 (4-1BB); CD150 (SLAMF1); CD152 (CTLA4); CD223 (LAG3); CD270 (HVEM); CD273 (PD-L2); CD274 (PD-L1); CD278 (ICOS); DAP10; LAT; KD2C SLP76; TRIM; ZAP70; and 41BB.
[0740] 49. The saRNA of any one of paragraphs 1-48, wherein the extracellular binding domain comprises an antigen binding domain from an antibody.
[0741] 50. The saRNA of any one of paragraphs 1-49, wherein the cargo comprises a ligand, a cell surface receptor, a transcription factor, a cytokine, a chemokine, an enzyme, and/or an antibody.
[0742] 51. The saRNA of any one of paragraphs 1-50, wherein the cargo comprises an antibody or fragment thereof.
[0743] 52. The saRNA of paragraph 51, wherein the antibody is a bispecific antibody.
[0744] 53. The saRNA of any one of paragraphs 1-52, wherein the cargo comprises a bispecific T cell engager (BiTE).
[0745] 54. The saRNA of any one of paragraphs 1-53, wherein the cargo comprises at least one domain responsive to an external input.
[0746] 55. The saRNA of any one of paragraphs 1-54, wherein the cargo comprises at least one non-coding RNA.
[0747] 56. The saRNA of paragraph 55, wherein the non-coding RNA is selected from the group consisting of siRNA, shRNA, and microRNA.
[0748] 57. The saRNA of any one of paragraphs 1-56, wherein the cargo comprises at least one vaccine-associated antigen.
[0749] 58. The saRNA of paragraph 57, wherein the vaccine-associated antigen comprises at least one protein encoded by a genome of a virus.
[0750] 59. The saRNA of paragraph 58, wherein the virus is selected from the group consisting of: Rift valley fever, Crimean-Congo haemorrhagic fever, Lassa fever, Chikungunya Virus (CHIKV), Nipah Virus (NiV), respiratory syncytial virus (RSV), Ebola virus, Marburg virus, West Nile virus, Venezuela equine encephalitis, yellow fever virus, Japanese encephalitis virus, western equine encephalitis virus, eastern equine encephalitis, cytomegalovirus (CMV), human immunodeficiency virus (HIV), influenza virus, Zika virus, middle eastern respiratory syndrome coronavirus (MERS-CoV), severe acute respiratory syndrome coronavirus (SARS-CoV), severe acute respiratory syndrome coronavirus 2 (SARS-CoV-2), human papillomavirus (HPV), herpes virus, rotavirus, varicella-zoster virus (VZV), dengue virus, hepatitis A virus, hepatitis B virus, rubella virus, poliovirus, and rabies virus.
[0751] 60. The saRNA of any one of paragraphs 57-59, wherein the vaccine-associated antigen comprises an antigen selected from the group consisting of: influenza virus hemagglutinin, Severe acute respiratory syndrome coronavirus 2 (SARS-CoV-2) Spike protein, and Human respiratory syncytial virus (RSV) Fusion glycoprotein.
[0752] 61. The saRNA of any one of paragraphs 57-60, wherein the vaccine-associated antigen comprises one of SEQ ID NOs: 13-16, 22, or an amino acid sequence that is at least 80% identical to one of SEQ ID NOs: 13-16, 22, that maintains the same function.
[0753] 62. The saRNA of any one of paragraphs 1-61, comprising the sequence of SEQ ID NO: 21 or a nucleic acid sequence that is at least 80% identical to SEQ ID NO: 21 that maintains the same function.
[0754] 63. The saRNA of any one of paragraphs 1-62, wherein the cargo comprises at least one transcription factor.
[0755] 64. The saRNA of paragraph 63, wherein the transcription factor is a stem cell transcription factor.
[0756] 65. The saRNA of paragraph 63 or 64, wherein the transcription factor is selected from the group consisting of Octamer-Binding Transcription Factor 3 (Oct3, Oct4), Sex-Determining Region Y (SRY)-Box Transcription Factor 2 (Sox2), Kruppel-Like Factor 4 (Klf4), and cellular myelocytomatosis oncogene (c-Myc).
[0757] 66. The saRNA of any one of paragraphs 1-65, wherein the cargo comprises at least one growth factor and/or cytokine.
[0758] 67. The saRNA of paragraph 66, wherein the growth factor or cytokine is selected from the group consisting of platelet-derived growth factor (PDGF), erythropoietin (EPO), vascular endothelial growth factor (VEGF), transforming growth factor-β1(TGF-β1), fibroblast growth factor (FGF), human relaxin-2 (RLX2), alpha-melanocyte-stimulating hormone (alpha-MSH), insulin-like growth factor-I (IGF-I), epidermal growth factor (EGF), nerve growth factor (NGF), granulocyte-monocyte colony-stimulating factor (GMCSF), Thrombopoietin (TPO), Bone morphogenic protein (BMP), hepatocyte growth factor (HGF), growth/differentiation factor (GDF), a Neurotrophin, migration stimulating factor (MSF), and sarcoma growth factor (SGF).
[0759] 68. The saRNA of any one of paragraphs 1-67, wherein the cargo comprises one or both Pappalysin-A1 (PAPPA1) and Pappalysin-A2 (PAPPA2).
[0760] 69. The saRNA of any one of paragraphs 1-68, wherein the cargo comprises at least one interleukin and/or a cognate receptor(s) of the interleukin and/or receptor sub-units for the interleukin.
[0761] 70. The saRNA of paragraph 69, wherein the interleukin is selected from the group consisting of IL-2, IL-4, IL-7, IL-10, IL-12, IL-13, and IL-15.
[0762] 71. The saRNA of any one of paragraphs 1-70, wherein the cargo comprises at least one enzyme with antioxidant activity.
[0763] 72. The saRNA of paragraph 71, wherein the enzyme is selected from the group consisting of phospholipid hydroperoxide glutathione peroxidase, superoxide dismutase-1, superoxide dismutase-2, Bruton's tyrosine kinase, adenosine deaminase, and ecto-nucleoside triphosphate diphosphydrolase.
[0764] 73. The saRNA of any one of paragraphs 1-72, wherein the cargo comprises glucagon-like peptide-1 (GLP-1) or a fragment thereof.
[0765] 74. The saRNA of any one of paragraphs 1-73, wherein the saRNA is substituted using the template of SEQ ID NO: 2 or a nucleic acid sequence that is at least 90% identical to SEQ ID NO: 2 that maintains the same function, and wherein the at least one cargo is inserted between the AflII and NdeI cut sites of SEQ ID NO: 2 or between nucleotides 7627 and 7628 of SEQ ID NO: 2.
[0766] 75. The saRNA of any one of paragraphs 1-74, wherein the nsp1, nsp2, nsp3, and nsp4 proteins encoded by the saRNA comprise SEQ ID NO: 4 and/or SEQ ID NO: 23 or at least one amino acid sequence that is at least 90% identical to SEQ ID NO: 4 and/or at least 90% identical to SEQ ID NO: 23, that maintains the same function.
[0767] 76. The saRNA of any one of paragraphs 1-75, wherein the saRNA is substituted using the template of SEQ ID NO: 5 or a nucleic acid sequence that is at least 90% identical to SEQ ID NO: 5 that maintains the same function.
[0768] 77. The saRNA of any one of paragraphs 1-76, wherein the pyrimidine comprises cytidine, and the modified nucleotide comprises 5-methylcytidine and/or 5-hydroxymethylcytidine, and the substituted saRNA comprises SEQ ID NO: 6 or a nucleic acid sequence that is at least 90% identical to SEQ ID NO: 6 that maintains the same function.
[0769] 78. The saRNA of any one of paragraphs 1-77, wherein the pyrimidine comprises uridine, and the modified nucleotide comprises 5-methyluridine and/or 5-hydroxymethyluridine, and the substituted saRNA comprises SEQ ID NO: 7 or a nucleic acid sequence that is at least 90% identical to SEQ ID NO: 7 that maintains the same function.
[0770] 79. The saRNA of any one of paragraphs 1-78, wherein nucleotides 7634 to 8347 of SEQ ID NO: 5, nucleotides 7617 to 8330 of SEQ ID NO: 6, or nucleotides 7617 to 8330 of SEQ ID NO: 7, each corresponding to mCherry, is replaced with at least one alternative cargo of interest.
[0771] 80. A self-amplifying RNA (saRNA) comprising from 5′ to 3′:
   [0772] (a) at least one non-structural protein derived from at least one virus;
   [0773] (b) a subgenomic promoter (SGP) derived from at least one virus; and
   [0774] (c) at least one cargo of interest;
      [0775] wherein the saRNA comprises at least 25% modified nucleotides, wherein the modified nucleotides are selected from the group consisting of 5-methylcytidine, 5-methyluridine, 5-hydroxymethyluridine, and 5-hydroxymethylcytidine;
      [0776] wherein the initiating nucleotide comprises an adenosine or adenosine analog; and
      [0777] wherein the initiating nucleotide of the saRNA is methylated at the 2′O position of the ribose (Cap1).
[0778] 81. A self-amplifying RNA (saRNA) comprising from 5′ to 3′:
   [0779] (a) a 5′ cap;
   [0780] (b) non-structural protein 1 (nsp1), non-structural protein 2 (nsp2), non-structural protein 3 (nsp3), and/or non-structural protein 4 (nsp4), each derived from at least one virus;
   [0781] (c) a subgenomic promoter (SGP) derived from at least one virus;
   [0782] (d) a 5′ untranslated region (UTR) derived from at least one virus;
   [0783] (e) at least one cargo of interest;
   [0784] (f) a 3′ untranslated region (UTR) derived from at least one virus; and
   [0785] (g) a poly-A tail;
      [0786] wherein the saRNA comprises at least 25% modified nucleotides, wherein the modified nucleotides are selected from the group consisting of 5-methylcytidine, 5-methyluridine, 5-hydroxymethyluridine, and 5-hydroxymethylcytidine;
      [0787] wherein the initiating nucleotide comprises an adenosine or adenosine analog; and
      [0788] wherein the initiating nucleotide of the saRNA is methylated at the 2′O position of the ribose (Cap1).
[0789] 82. The saRNA of paragraph 80 or 81, further comprising at least one 5′ conserved sequence element (CSE) and/or at least one 3′ conserved sequence element (CSE) derived from at least one virus.
[0790] 83. A self-amplifying RNA (saRNA) comprising from 5′ to 3′:
   [0791] (a) at least one non-structural protein derived from at least one virus;
   [0792] (b) a subgenomic promoter (SGP) derived from at least one virus; and
   [0793] (c) at least one cargo of interest.
[0794] 84. A self-amplifying RNA (saRNA) comprising from 5′ to 3′:
   [0795] (a) a 5′ cap;
   [0796] (b) non-structural protein 1 (nsp1), non-structural protein 2 (nsp2), non-structural protein 3 (nsp3), and/or non-structural protein 4 (nsp4), each derived from at least one virus;
   [0797] (c) a subgenomic promoter (SGP) derived from at least one virus;
   [0798] (d) a 5′ untranslated region (UTR) derived from at least one virus;
   [0799] (e) at least one cargo of interest;
   [0800] (f) a 3′ untranslated region (UTR) derived from at least one virus; and
   [0801] (g) a poly-A tail.
[0802] 85. The saRNA of paragraph 83 or 84, further comprising at least one 5′ conserved sequence element (CSE) and/or at least one 3′ conserved sequence elements (CSE) derived from at least one virus.
[0803] 86. The saRNA of any one of paragraphs 83-85, wherein the saRNA does not comprise modified nucleotides.
[0804] 87. The saRNA of any one of paragraphs 83-86, wherein the saRNA comprises less than 25% modified nucleotides.
[0805] 88. The saRNA of any one of paragraphs 83-87, wherein the cargo comprises a chimeric antigen receptor (CAR) comprising an extracellular domain that specifically binds to an antigen of interest.
[0806] 89. The saRNA of any one of paragraphs 83-88, wherein the CAR is selected from the group consisting of:
   [0807] (a) a conventional CAR;
   [0808] (b) an ON-CAR;
   [0809] (c) an OFF-CAR system;
   [0810] (d) an ON/OFF-CAR;
   [0811] (e) an inhibitory CAR; or
   [0812] (f) a split, universal, programmable and reconfigurable (SUPRA) CAR system.
[0813] 90. A nucleic acid encoding or comprising the saRNA of any one of paragraphs 1-89.
[0814] 91. A vector encoding or comprising the saRNA of any one of paragraphs 1-89.
[0815] 92. A composition comprising the saRNA of any one of paragraphs 1-89.
[0816] 93. The composition of paragraph 92, wherein the saRNA is formulated at a dose of about 5×10⁻⁴ mg/kg.
[0817] 94. The composition of paragraph 92, wherein the saRNA is formulated at a dose of about 5×10⁻³ mg/kg.
[0818] 95. The composition of paragraph 92, wherein the saRNA is formulated at a dose of about 5×10⁻² mg/kg.
[0819] 96. The composition of paragraph 92, wherein the saRNA is formulated at a dose of about 5×10⁻¹ mg/kg.
[0820] 97. The composition of any one of paragraphs 92-96, formulated as lipid nanoparticles.
[0821] 98. The composition of any one of paragraphs 92-96, formulated in a polymeric matrix.
[0822] 99. A cell contacted with the saRNA of any one of paragraphs 1-89, the nucleic acid of paragraph 90, the vector of paragraph 91, or the composition of any one of paragraphs 92-98.
[0823] 100. The cell of paragraph 99, wherein the cell is a eukaryotic cell.
[0824] 101. A pharmaceutical composition comprising the saRNA of any one of paragraphs 1-89 and a pharmaceutically acceptable carrier.
[0825] 102. A pharmaceutical composition comprising the nucleic acid of paragraph 90, and a pharmaceutically acceptable carrier.
[0826] 103. A pharmaceutical composition comprising the vector of paragraph 91, and a pharmaceutically acceptable carrier.
[0827] 104. A pharmaceutical composition comprising the cell of any one of paragraphs 99-100 and a pharmaceutically acceptable carrier.
[0828] 105. The pharmaceutical composition of any one of paragraphs 101-104, wherein the saRNA is formulated at a dose of about 5×10⁻⁴ mg/kg.
[0829] 106. The pharmaceutical composition of any one of paragraphs 101-104, wherein the saRNA is formulated at a dose of about 5×10⁻³ mg/kg.
[0830] 107. The pharmaceutical composition of any one of paragraphs 101-104, wherein the saRNA is formulated at a dose of about 5×10⁻² mg/kg.
[0831] 108. The pharmaceutical composition of any one of paragraphs 101-104, wherein the saRNA
[0832] is formulated at a dose of about 5×10⁻¹ mg/kg.
[0833] 109. The pharmaceutical composition of any one of paragraphs 101-108, formulated as lipid nanoparticles.
[0834] 110. The pharmaceutical composition of any one of paragraphs 101-108, formulated in a polymeric matrix.
[0835] 111. A method of expressing at least one cargo of interest in a cell, the method comprising contacting the cell with the saRNA of any one of paragraphs 1-89.
[0836] 112. A method of expressing at least one cargo in a subject in need thereof, the method comprising administering to the subject an effective amount of the pharmaceutical composition any one of paragraphs 101-110.
[0837] 113. The method of paragraph 112, wherein the subject is a human.
[0838] 114. The method of paragraph 112, wherein the subject is a livestock animal or a pet.
[0839] 115. The method of any one of paragraphs 111-114, wherein the saRNA is a modified saRNA comprising at least 25% modified nucleotides.
[0840] 116. The method of paragraph 115, wherein the modified saRNA replicates at a level greater than or equal to that of an equivalent dose of a corresponding saRNA with less than 25% modified nucleotides.
[0841] 117. The method of paragraph 115, wherein the modified saRNA expresses the cargo at a level greater than or equal to that of an equivalent dose of a corresponding saRNA with less than 25% modified nucleotides.
[0842] 118. The method of paragraph 115, wherein the transfection efficiency of the modified saRNA is greater than that of an equivalent dose of a corresponding saRNA with less than 25% modified nucleotides.
[0843] 119. The method of paragraph 115, the modified saRNA produces an early interferon response in the subject, and wherein the early interferon response is decreased compared to an equivalent dose of a corresponding saRNA with less than 25% modified nucleotides.
[0844] 120. The method of paragraph 115, wherein the cargo is expressed at a detectable level from the modified saRNA for an increased time period compared to an equivalent dose of a corresponding saRNA with less than 25% modified nucleotides.
[0845] 121. The method of any one of paragraphs 111-120, wherein the cell is a human cell.
[0846] 122. The method of any one of paragraphs 111-121, wherein the subject has cancer.
[0847] 123. The method of any one of paragraphs 111-122, wherein the subject is in need of vaccination for an infectious disease.
[0848] 124. The method of any one of paragraphs 111-123, wherein the subject is in need of protein replacement therapy.
[0849] 125. The method of any one of paragraphs 111-124, wherein the subject is in need of antibody therapy.
[0850] 126. The method of any one of paragraphs 111-125, wherein the subject is in need of treatment for diabetes and/or obesity.
[0851] 127. The method of any one of paragraphs 111-126, wherein the subject is in need of BITE therapy.
[0852] 128. The method of any one of paragraphs 111-127, wherein the saRNA permits tissue, organ, or cell-type specific expression of the cargo.
[0853] 129. The method of paragraph 128, wherein the saRNA comprises greater than 50% substitution of uridine with 5-methyluridine, and the saRNA has increased kidney specific expression of the cargo compared to an equivalent dose of a corresponding saRNA comprising less than 50% substitution of uridine with 5-methyluridine.
[0854] 130. The method of any one of paragraphs 111-129, wherein the modified saRNA modulates cellular differentiation of a cell containing the saRNA at a level equivalent to or greater than the level of modulation achieved with an equivalent dose of a corresponding saRNA with less than 25% modified nucleotides.
[0855] 131. The method of paragraph 130, wherein the cell is modulated by expression of a stem cell transcription factor encoded by the saRNA.
[0856] 132. The method of paragraph 130 or 131, wherein the cell is modulated to become a stem cell.
[0857] 133. The method of any one of paragraphs 111-132, wherein the at least one cargo is expressed constitutively in the cell.
[0858] 134. The method of any one of paragraphs 111-133, wherein the at least one cargo is expressed constitutively in the subject.
[0859] 135. The method of any one of paragraphs 111-134, the method further comprising contacting the cell with at least one input to control the fate or function of the cell.
[0860] 136. The method of any one of paragraphs 111-135, the method further comprising administering to the subject at least one input to control the fate or function of at least one cell in the subject.
[0861] 137. The method of any one of paragraphs 135 or 136, wherein the input is endogenous to the environment of the cell comprising the saRNA.
[0862] 138. The method of any one of paragraphs 135 or 136, wherein the input is exogenous to the environment of the cell comprising the saRNA.
[0863] 139. The method of any one of paragraphs 135-138, wherein the input is a cell.
[0864] 140. The method of any one of paragraphs 135-139, wherein the input is a protein.
[0865] 141. The method of any one of paragraphs 135-140, wherein the input is a small molecule.
[0866] 142. The method of any one of paragraphs 135-141, wherein the input is a specific wavelength or wavelengths of light.
[0867] 143. The method of any one of paragraphs 135-142, wherein the input is a specific temperature.
[0868] 144. The method of any one of paragraphs 135-143, wherein the input is application of a magnetic field.
[0869] 145. The method of any one of paragraphs 135-144, wherein the input results in death of the cell comprising the saRNA, increased clearance rate of the cell comprising the saRNA, and/or cell-cycle arrest of the cell comprising the saRNA.
[0870] 146. The method of any one of paragraphs 135-145, wherein the input results in inhibition of a repressible protease domain in the cargo.
[0871] 147. The method of any one of paragraphs 135-146, wherein the input results in the activation of a repressible protease domain in the cargo.
[0872] 148. The method of any one of paragraphs 135-147, wherein the input results in oligomerization and a resultant activation of the cargo.
[0873] 149. The method of any one of paragraphs 135-148, wherein the input results in oligomerization and a resultant inhibition of the cargo.
[0874] 150. The method of any one of paragraphs 111-149, wherein the cargo comprises a chimeric antigen receptor.
[0875] 151. The method of any one of paragraphs 111-150, wherein the cargo comprises multiple chimeric antigen receptors.
[0876] 152. The method of any one of paragraphs 111-151, wherein control of the cell requires the presence of all inputs simultaneously.
[0877] 153. The method of any one of paragraphs 111-152, wherein control of the cell requires the presence of any input.
[0878] 154. The method of any one of paragraphs 111-153, wherein control of the cell requires both the presence and absence of a distinct combination of inputs.
[0879] 155. The method of any one of paragraphs 111-154, wherein the fate of the cell is an altered cell type.
[0880] 156. The method of any one of paragraphs 111-155, wherein the fate of the cell is an altered cell localization.
[0881] 157. The method of any one of paragraphs 111-156, wherein the function of the cell is lytic.
[0882] 158. The method of any one of paragraphs 111-157, wherein the function of the cell is stimulatory.
[0883] 159. The method of any one of paragraphs 111-158, wherein the function of the cell is immunomodulatory.
[0884] 160. The method of any one of paragraphs 111-159, wherein the cargo is a protein comprising a chimeric antigen receptor comprising an extracellular domain that senses at least one input signal.
[0885] 161. The method of any one of paragraphs 111-160, wherein the cargo is a protein comprising at least one chimeric antigen receptor, and the input is a small molecule and/or a protein.
[0886] 162. The method of any one of paragraphs 111-161, wherein the cargo is a protein comprising at least one domain responsive to an external input.
[0887] 163. The method of any one of paragraphs 111-162, wherein the cargo is a protein comprising at least one repressible protease domain that responds to at least one protease inhibitor to regulate activity of the cargo.
[0888] 164. The method of any one of paragraphs 111-163, wherein the saRNA is delivered to the cell in situ.
[0889] 165. The method of any one of paragraphs 111-164, wherein the saRNA is delivered to the cell ex vivo.
[0890] 166. The method of any one of paragraphs 111-165, wherein the cargo of the saRNA encodes for and expresses at least one cargo protein, at least one protein reporters and/or at least one expression-enhancing protein.
[0891] 167. The method of paragraph 166, wherein the cargo protein is a chimeric antigen receptor, and the expression enhancing protein is B18R.
[0892] 168. The method of paragraph 166, wherein the cargo protein is a chimeric antigen receptor, and the expression enhancing protein is E3L.
[0893] 169. The method of any one of paragraphs 111-168, wherein the saRNA is delivered to the cell by electroporation.
[0894] 170. The method of any one of paragraphs 111-169, wherein the saRNA is delivered to the cell by lipid nanoparticles.
[0895] 171. The method of any one of paragraphs 111-170, wherein the saRNA, or a composition comprising the saRNA, comprises a targeting domain to increase transfection efficiency of the saRNA into a specific cell type.
[0896] 172. The method of any one of paragraphs 111-171, wherein the saRNA increases the level of expression of a cargo protein in the cell.
[0897] 173. The method of any one of paragraphs 111-172, wherein the activity of the cargo protein expressed by the saRNA is controlled by administration of a small molecule and/or a protein and/or an RNA molecule.
[0898] 174. The method of paragraph 173, wherein the RNA molecule is an aptamer.
[0899] 175. The method of any one of paragraphs 111-174, wherein the protein is a chimeric antigen receptor (CAR), and the activity of the CAR is regulated by at least one small molecule-responsive domain.
[0900] 176. The method of any one of paragraphs 111-175, wherein the activity of the cargo protein expressed by the saRNA is increased and/or decreased by administration of at least one small molecule.
[0901] 177. The method of paragraph 176, wherein the at least one small molecule is a protease inhibitor or a molecule capable of interacting with at least one protein domain in the cargo protein.
[0902] 178. The method of any one of paragraphs 111-177, wherein the saRNA encodes and expresses a plurality of cargo proteins that are capable of interacting with each other.
[0903] 179. The method of paragraph 178, wherein the interaction of the plurality of cargo proteins results in conditional activity of the cell transfected by the saRNA.
[0904] 180. The method of paragraph 178 or 179, wherein the cargo proteins capable of interacting with each other are chimeric antigen receptors with activating and/or inhibitory functions.
[0905] 181. The method of any one of paragraphs 111-180, wherein, a plurality of distinct saRNAs is delivered to a mixture of cells.
[0906] 182. The method of any one of paragraphs 111-181, wherein the saRNA is administered to the subject via intraocular, intraosseous (IO), intraperitoneal (IP), subcutaneous (SC), intravenous (IV), intramuscular (IM), intrarectal, intravaginal, intraarticular (IA), inhalation, or topical administration.

[0907] The technology described herein is further illustrated by the following examples which in no way should be construed as being further limiting.

### EXAMPLES

### Example 1: Increased Expression of Chimeric Antigen Receptors in Immune Cells for an Extended Duration by Transfection with Self-Replicating RNA

[0908] Described herein is a system for the delivery and application of self-replicating RNA to permit the modification of cells by expression of cargo proteins. The cargo proteins can be receptors, ligands, transcription factors, reporter proteins, enzymes, or any other genetically encodable protein. Self-replicating RNA delivery confers higher protein expression than that of conventional mRNA and maintains expression for longer duration. This system can be used to simultaneously express multiple proteins at levels comparable to or greater than other methods used to establish constitutive protein expression (e.g., transient DNA transfection, mRNA transfection, lentiviral transduction). Additionally, described herein is a system for enhanced expression, and controlled activity of the cargo either by external means or by in situ logic computation circuits. Such control permits reversible action and conditional activity of the cargo, respectively. As a clinically relevant example of the technology, self-replicating RNA that encode several cargos (e.g., reporter proteins, chimeric antigen receptors (CAR), expression enhancing proteins) can be delivered to T cells. The self-replicating RNAs described herein can be used in any application in which the modification of cells is needed and can be employed to modify cells in vivo by delivery with lipid nanoparticles.

[0909] As a non-limiting example, described herein are self-replicating RNA formats to express a range of cargo and reporter proteins (see e.g., FIG. 1A-1B). The examples described herein relate to the use of the self-replicating RNA platform to express functional chimeric antigen receptors in T cells to generate CAR-T cells. There are many challenges associated with ex vivo cell engineering. The isolation of immune cells and subsequent genetic engineering and expansion is costly and time consuming, representing a major bottleneck from a patient and manufacturing perspective. An alternative to this is to reprogram cells in vivo through the delivery of mRNA. Challenges associated with expression level and duration have been reported. As a result, repeat dosing is often required to achieve functional benefit, and efficacy has been shown in a limited number of animal models. By creating self-replicating RNA that combines components from RNA viruses and cargos of interest, greater expression of therapeutic programs can occur over a longer duration. Moreover, self-replicating RNA systems can be delivered in vivo to control immune cells for therapeutically relevant purposes. The CAR-T cells generated from self-replicating RNA have higher levels of CAR expression over a longer period when compared to CAR-T cells generated via mRNA (see e.g., FIG. 1A-1B).

[0910] The replication of self-replicating RNA is a result of the inclusion of sequence elements derived from RNA viruses. The replication components can be derived from the Venezuela Equine Encephalitis (VEE) alphavirus as an example, and sequences from other viruses can provide similar function. Upon entrance inside of a cell, the self-replicating RNA is translated to express the four proteins (nsp1, nsp2, nsp3, nsp4) necessary for the formation of an RNA replication complex. The resulting RNA replication complex can then replicate the full-length RNA strand by interaction with conserved sequence elements at the 5′ and 3′ ends of the RNA. Additionally, the replication complex can recognize a subgenomic promoter (SGP) sequence to enable amplification of the RNA encoding the cargo. This replication and amplification activity allows for higher levels of expression of delivered cargo over a longer period when compared with conventional mRNA.

[0911] Self-replicating RNA formats to express a range of proteins and reporter molecules were developed that utilize components from the Venezuela Equine Encephalitis Virus (VEEV) in various formats (see e.g., FIG. 2). A series of self-replicating RNA sequences that encode chimeric antigen receptors targeting CD19 and HER2 were developed (see e.g., FIG. 3). The RNA was generated by in vitro transcription. As a control, conventional mRNA (lacking self-replicating components) encoding HER2 and CD19 CARs were synthesized. All RNA species were transfected into Jurkat T cells and the levels of expression were tracked longitudinally by measuring the fluorescence of an mCherry tag placed on the C-terminus of the CARs or by staining with an anti-myc antibody reactive to a myc tag on the extracellular domain of the CAR. After transfection, the cells expressing the HER2 CAR were analyzed at 48 hours and 96 hours. A larger percentage of cells transfected with self-replicating RNA had detectable CAR expression at 96 hours when compared with the conventional mRNA transfected cells (see e.g., FIG. 4). This indicates a greater level of expression at the protein level. The cells transfected with RNA encoding the CD19 CAR were tracked along with cells transduced with lentivirus encoding a CD19 CAR as a control. A larger percentage of cells transfected with the self-replicating RNA encoding the CD19 CAR had detectable CAR expression via staining with an anti-myc antibody (see e.g., FIG. 5). As an additional example, primary CD3+ T cells isolated from a human donor were transfected with self-replicating RNA and conventional mRNA encoding a CD19 chimeric antigen receptor. The expression was measured over time by staining for the receptor with an anti-myc antibody and by measuring the fluorescence of the C-terminal mCherry tag. The expression levels were greater and lasted for a longer time period in cells transfected with the self-replicating RNA (see e.g., FIG. 6). By comparison, cells expressing the receptor at levels detectable by the anti-myc stain were not detected 5 days after transfection with the conventional mRNA. These examples demonstrate the ability to modify cells (e.g., immune cells) to express a cargo protein via transfection with self-replicating RNA. Additionally, the expression is greater than levels resulting from transfection with conventional mRNA and lasts for a longer period of time.

### Example 2: Expression of Cargo Proteins in Cells Via Self-Replicating RNA Results in Enhanced Protein Functionality Over a Longer Duration when Compared with Conventional mRNA

[0912] The self-replicating RNA encoding the HER2 and CD19 chimeric antigen receptors were transfected into Jurkat T cells that contain an NFAT-GFP reporter system, commonly utilized to measure T cell activation under various conditions. When the Jurkat T cells become activated, GFP is expressed. To measure the response of the cells transfected with the HER2 CAR to the HER2 antigen, the cells were cultured on tissue culture plates treated with PBS or HER2 antigen. The cultured cells were incubated overnight, beginning 72 hours after transfection. In the case of cells transfected with the conventional mRNA encoding the HER2 CAR, negligible activation was observed (see e.g., FIG. 7, top and bottom). However, the cells transfected with the self-replicating HER2 CAR RNA displayed robust activation as measured by the mean fluorescence intensity of GFP via flow cytometry (see e.g., FIG. 7, bottom).

[0913] Jurkat T cells transfected with conventional or self-replicating RNA encoding a CD19 CAR were co-cultured with CD19 expressing Nalm6 cells at a series of time points after transfection. The activation of the CAR-T cells was determined by measuring the percentage of CAR expressing NFAT GFP reporter cells that were GFP positive. Cells transfected with conventional mRNA displayed a reduced response on day 3 compared to day 1 and did not respond to the CD19 antigen after 7 days. By comparison, cells transfected with the self-replicating RNA respond at all time points in the assay (see e.g., FIG. 8).

[0914] As an additional example, CAR-T cells were generated from CD3+ human primary T cells by transfection with conventional or self-replicating RNA encoding a CD19 CAR. The resulting cells were co-cultured overnight with Nalm6 cells, beginning 48 hours after transfection. The CAR-T cells were then stained with an antibody targeting CD69, a surface marker for early activation in T cells. The proportion of cells positive for CD69 was quantified via flow cytometry. The CAR-T cells transfected with conventional and self-replicating RNA encoding the CD19 CAR responded to the target cells and expressed CD69 (see e.g., FIG. 9). Additionally, the fold change in mean fluorescence intensity with and without target cells present was quantified. The fold change was greater for the cells transfected with the self-replicating RNA (see e.g., FIG. 10). The CAR-T cells were also co-cultured with CD19 and luciferase expressing Nalm6 cells to measure the cytotoxic function of the CAR-T cells. The co-culture was performed at various effector (CAR-T cells) to target (Nalm6 cells) ratios. The degree of killing was determined by quantifying the signal from the luciferase enzyme expressed by the Nalm6 cells. The CAR-T cells generated via transfection with self-replicating RNA killed the most Nalm6 cells at all E:T ratios tested (see e.g., FIG. 11). The observed increase in activation marker and enhanced killing ability is likely a result of the increased expression of the CD19 CAR expressed from self-replicating RNA. These examples demonstrate the ability to express cargo proteins with enhanced activity that can occur over a longer duration via transfection with self-replicating RNA.

### Example 3: Transfection of Cells with Self-Replicating RNA Results in Greater Expression Levels of a Protein Per Cell

[0915] To analyze the levels of expression resulting from the delivery of self-replicating RNA to immune cells, Jurkat T cells were transfected with self-replicating and conventional RNA encoding a CD19 CAR. The resulting CAR-T cells were stained with an anti-myc antibody. The antibody binds the extracellular scFv containing a myc tag. The CAR-T cells generated by self-replicating RNA had approximately 13-fold greater expression of the CAR than CAR-T cells produced via conventional mRNA or by lentiviral transduction (see e.g., FIG. 12). By comparison, the lentivirally transduced cells and cells produced by transfection with conventional mRNA had approximately the same level of expression. The expression levels were tracked over time by measuring the fluorescence from the mCherry tagged CD19 CAR. The CAR was detected on cells transfected with the self-replicating RNA over a 12-day period. In comparison, the receptor was no longer detected after 4 days in the case of conventional mRNA transfection (see e.g., FIG. 13). Overall, CAR expression in cells transfected with self-replicating RNA, measured with mCherry mean fluorescence intensity, is 1.5-6× higher than in lentiviral transduced CAR T cells (see e.g., FIG. 13). Additionally, the amount of mRNA was measured over time via quantitative PCR. It was found that the self-replicating RNA produced transcript levels that were consistently higher than the cells transduced with lentivirus (see e.g., FIG. 14). These examples demonstrate the utility of this invention in expressing cargo proteins at levels equal to or greater than other methods used to establish constitutive protein expression.

### Example 4: Self-Replicating RNA can be Utilized to Express Cargo with Externally Controllable Activity in Cells

[0916] A framework for controlling the activity of cells by expressing proteins with controllable activity by self-replicating RNA was developed (see e.g., FIG. 1). This control is highly desirable in the generation of therapeutic cells so that activity can be precisely modulated. The constructs described herein can be used to express a therapeutic program in situ, without genetic modification, and in a regulated and controllable manner, e.g., to reduce cost and enhance the safety of therapeutic applications.

[0917] The activity of the cargo can be controlled externally by including protein domains regulated by small molecules, light, etc. The presence or absence of these factors can modify the cargo activity by increasing or decreasing the desired function. This is often achieved via regulation at the protein level. The expressed protein cargo can be degraded by the addition of factors that result in an enhanced rate of protein degradation. Additionally, multiple components of the protein can be separated and recombined by the addition of external components. An alternative strategy to achieve regulation of the cargo is to regulate at the translational level. The translation of the cargo sequence can be modulated by RNA-binding proteins that recognize sequences included in the design of the self-replicating RNA. The RNA-binding proteins can block translation or result in RNA transcript degradation. To control the activity of the RNA-binding proteins and resulting cargo, the RNA-binding protein function can be controlled by external means as discussed above.

[0918] To demonstrate that the activity of the cargo delivered by the self-replicating RNA, self-replicating RNA encoding externally controlled chimeric antigen receptors were developed (see e.g., FIG. 15). Self-replicating RNA can be used to express an NS3 CAR with externally controllable activity. The NS3 CAR is described in exemplary patents U.S. Ser. No. 11/059,864B2, US20220098246A1, the contents of each of which are incorporated herein by reference in their entireties. As described previously, the NS3 domain self-cleaves and prevents CAR activation in the absence of a protease inhibitor (e.g., grazoprevir, glecaprevir, simeprevir, boceprevir). In this case, the protease inhibitor acts as an “on” switch to control CAR activity (see e.g., FIG. 16). The NS3 domain can also be used in a manner that results in CAR inactivation in the presence of protease inhibitor. As described previously, the NS3 OFF CAR contains two components that are expressed as separate polypeptides. The first component consists of an scFv, transmembrane domain, costimulatory domain, and an NS3 binding peptide. The second component consists of a transmembrane domain, catalytically dead NS3 domain, and an activation domain. In the absence of a protease inhibitor, the NS3 binding peptide binds the catalytically dead NS3 domain, allowing for CAR activation to occur. When a protease inhibitor is added, the NS3 binding peptide is displaced, blocking CAR signaling and activation from occurring (see e.g., FIG. 17). To precisely control CAR activity, it is desirable to have a multi-input control strategy that involves two control modules that individually regulate activity. To demonstrate this, an NS3-IKZF3 CAR that is regulated by a protease inhibitor and by lenalidomide was developed. When a protease inhibitor is added, the cleavage of vital CAR domains are prevented, allowing for activation to occur in the presence of antigen. When lenalidomide is added, an E3 ligase is recruited to the cytoplasmic IKZF3 domain, resulting in ubiquitination and subsequent degradation of the CAR. This additional control element is useful to turn off CAR-T cell activity in the event of over-activation or safety concerns (see e.g., FIG. 18).

[0919] Self-replicating RNAs encoding NS3 and NS3-IKZF3 CARs targeting CD19 were developed. To characterize the controllable nature of the cargo proteins, the self-replicating RNA was transfected into Jurkat T cells with an NFAT-GFP reporter system. The expression of the NS3 and NS3-IKZF3 CARs were measured by staining with an anti-myc antibody and by measuring the fluorescence of an mCherry expression reporter. The controllable CARs had levels of expression equal to or greater than that of a conventional CAR expressed by lentivirus or conventional mRNA (see e.g., FIG. 19). To test the CD19 NS3 CAR “on” behavior, the transfected Jurkat T cells were co-cultured with CD19 expressing Nalm6 cells in the absence or presence of grazoprevir. The degree of NFAT activation was measured by flow cytometry. The administration of grazoprevir permitted CAR-T cell activation in the presence of target cells, with minimal activation in the presence of target cells and the absence of grazoprevir (see e.g., FIG. 20). To test the activity of the NS3-IKZF3 CAR, the transfected Jurkat cells were co-cultured with Nalm6 in the absence of grazoprevir and lenalidomide, in the presence of grazoprevir, and in the presence of grazoprevir and lenalidomide. Activation when grazoprevir was present and reduction in activation when grazoprevir and lenalidomide were present together was observed (see e.g., FIG. 21).

[0920] To further characterize the system, CD3+ human primary T cells were transfected with the self-replicating RNA encoding the NS3 CD19 CAR. The resulting CAR-T cells were co-cultured with CD19 and luciferase expressing Nalm6 cells at a 2:1 effector to target cell ratio in the presence or absence of grazoprevir. The in vitro killing of the CAR-T target cells was dependent on grazoprevir (see e.g., FIG. 22). The percentage of cells killed increased from approximately 20% to 60% when grazoprevir was added. Additionally, the killing observed in the presence of grazoprevir was similar to that of cells transfected with self-replicating RNA encoding the conventional CD19 CAR that lacks the NS3 domain. This example demonstrates the ability to deliver a cargo protein with externally controlled activity via self-replicating RNA.

### Example 5: Self-Replicating RNA can be Utilized to Express Proteins that Result in the Ability to Perform Logic Computation to Control Cell Activity

[0921] A strategy to control the activity of the cargo by utilizing logic computation was developed. In the context of chimeric antigen receptor therapy, logic computation can be utilized to enhance target specificity and enable conditional activity. This is particularly useful in distinguishing between healthy tissue and tumors with heterogeneous antigen expression. Logic computation enables the ability to produce an output that depends on an input signal or combination of input signals. To demonstrate that logic computation can be used to control the activity of cargo expressed from self-replicating RNA, a polycistronic self-replicating RNA encoding multiple chimeric antigen receptors was developed. As an example, an activating CAR targeting CD19 and an inhibitory CAR targeting HER2 were co-expressed from self-replicating RNA with their coding sequences separated by an internal ribosome entry site (IRES) sequence. The activation of the resulting CAR-T cells is dependent on the expression of two antigens. If the antigen targeted by the activating CAR is present exclusively, maximal activation can occur. If the antigen targeted by the inhibitory CAR is also present, activation is prevented or reduced (see e.g., FIG. 23). In this way, the inhibitory CAR operates as a NOT gate. It is desirable to titrate the ratio of expression of the activating CAR to the inhibitory CAR. For maximal activity of the inhibitory CAR, the expression level should be greater than the expression level of the activating CAR. To accomplish this, the inhibitory CAR coding sequence was inserted after the IRES sequence. It is known that often the gene following the IRES sequence is expressed at an efficiency lower than the gene preceding it. An additional strategy to titer the expression of multiple cargos is to express the cargos from a polycistronic self-replicating RNA containing multiple subgenomic promoters. In this design, each gene is placed downstream of a subgenomic promoter. The sequence of the subgenomic promoter can be modulated to change the resulting expression level.

[0922] As an example, the self-replicating RNA encoding the CD19 activating CAR and the HER2 inhibitory CAR was transfected into Jurkat T cells. The resulting expression of both receptors was greater than what is typically observed by constitutive expression of a single receptor (see e.g., FIG. 24). This invention circumvents many of the challenges associated with the high expression of multiple receptors in a single cell. Many of these challenges are a result of maximum cargo capacities imposed by genetic engineering methods. With self-replicating RNA, the cargo capacity is presumably on the order of 10 kilobases −100 kilobases, which is much larger than the limit imposed by many genetic engineering methods commonly used to establish constitutive expression. To measure activity, the resulting dual CAR-T cells were then cultured on plates coated with CD19 antigen alone or CD19 antigen and HER2 antigen. As controls, lentiviral generated CAR-T cells and cells transfected with self-replicating RNA encoding the CD19 activating CAR only were evaluated.

[0923] For the lentiviral transduced CAR-T cells and the activating CAR only cells, a 20-40-fold activation response was observed in the presence of CD19 antigen. When HER2 antigen was added, the activation response increased. This is likely a result of improved binding of the CD19 antigen to the plate when HER2 is added. However, in the case of the cells transfected with the self-replicating RNA encoding the CD19 activating CAR and the HER2 inhibitory CAR, a drastic decrease in activation was observed in the presence of HER2 (see e.g., FIG. 25). In this case, HER2 is acting as a signal to turn off CAR-T activity. This demonstrates the ability to express multiple CARs or cargo proteins simultaneously to generate cells that conduct logic computation to improve specificity of the desired activity.

[0924] The example presented here demonstrates the ability of self-replicating RNA to create CAR-T cells that respond to two antigens and conduct a NOT gate operation. The self-replicating RNA platform can also be used to conduct a variety of other logic operations (AND, OR). The AND operation can be conducted by expressing multiple chimeric antigen receptors, one with an activating domain and the other with costimulatory domains. The resulting CAR-T cell activity is maximal only when both antigens are detected by the two receptors. The OR operation can be conducted by expressing multiple conventional chimeric antigen receptors targeting separate antigens. If either of the antigen is detected, CAR-T cell activity can occur. The self-replicating RNA system can be used to express the SUPRA CAR system (see e.g., WO2017091546A1, U.S. Ser. No. 11/530,252B2, the contents of each of which are incorporated herein by reference in their entireties). The SUPRA CAR system consists of a multi-component CAR in which the signaling and recognition portions of the CAR are separated and expressed as separate polypeptides (see e.g., FIG. 26). The recognition portion of the CAR can bind to a cancer cell marker but not activate an immune cell unless combined with the signaling portion of the multi-component CAR. The recognition portion of the CAR can bind to the other CAR component by recognizing an extracellular cognate leucine zipper on the signaling domain portion. This allows for the ability to target multiple antigens from the same CAR-T cell by applying different recognition components. The ability to target multiple antigens allows for logic computation by multiplexing different combinations of signaling and recognition portions of the SUPRA CAR system. The self-replicating RNA system presented here can be utilized to deliver the SUPRA CAR system to conduct complex logic operations including AND, OR, etc.

### Example 6: Expressing Externally Controlled Cargo Proteins Via Self-Replicating RNA Results in Improved Function

[0925] There are several advantages of utilizing externally controlled cargo to control the phenotype of the cells modified with self-replicating RNA. To demonstrate this, Jurkat T cells were transfected with the self-replicating RNA encoding the drug controllable CARs containing the NS3 and NS3+IKZF3 domains. High expression of a CAR receptor can trigger ligand-independent activation, a phenomenon often referred to as tonic signaling. To measure tonic signaling, Jurkat NFAT GFP reporter cells were transfected with conventional or self-replicating RNA encoding a CD19 CAR or a CD19 CAR with an NS3 domain. CD19 CAR-T cells with an NS3 domain exhibited low levels of basal activation, indistinguishable from wild-type Jurkat T cells (see e.g., FIG. 27). To measure the response to antigen, the RNA transfected and lentivirally transduced CAR-T cells were co-cultured with Nalm6 cells. For the CAR-T cells containing an NS3 domain, grazoprevir was added to allow for activation to occur. The activation response from the cells transfected with self-replicating RNA encoding the NS3 CD19 CAR was indistinguishable from that of lentivirally transduced CD19 CAR-T cells in a co-culture assay (see e.g., FIG. 28). By comparison, the cells transfected with the self-replicating RNA encoding a conventional CD19 CAR had an activation response that was weaker than the lentivirally transduced cells, but much greater than the cells transfected with the conventional mRNA. This example demonstrates the ability to improve function after transfection with self-replicating RNA by controlling the cargo externally.

### Example 7: Additional Cargo Proteins can be Expressed by the Self-Replicating RNA to Enhance Cargo Protein Expression

[0926] The entrance of RNA into cells can induce an innate immune response through various pathways. This response can trigger an interferon response known to reduce transfection efficiency and expression duration. To reduce the response and increase transfection efficiency, proteins known to prevent or reduce the interferon response can be delivered in addition to the desired cargo via self-replicating RNA. To demonstrate this, a series of self-replicating RNA systems were developed that deliver a chimeric antigen receptor and one of two proteins, B18R or E3L. The function of B18R is to act as a decoy receptor for type I interferon proteins. The function of E3L is to bind double stranded RNA in order to prevent recognition by host factors. The co-expression of the CAR and either of the expression enhancing proteins can be accomplished by placing an IRES sequence between the two cargos. To characterize the effect of B18R and E3L, self-replicating RNAs encoding a CD19 CAR and either B18R or E3L were transfected into Jurkat T cells with an NFAT-GFP reporter system. The transfection efficiency was higher when the E3L protein was co-expressed (see e.g., FIG. 29). Additionally, the greatest levels of expression overtime occurred when the E3L protein was co-expressed (see e.g., FIG. 30).

[0927] To assess the activation state of the cells that can be induced by the self-replicating RNA variants, the percentage of GFP+ cells was determined. The cells that co-expressed the B18R protein along with the CAR had lowest levels of GFP expression (see e.g., FIG. 31). This indicates that B18R can reduce an innate immune response against the self-replicating RNA.

[0928] Additionally, both proteins can be co-delivered simultaneously along with the cargo to further enhance expression. To assess functionality of the resulting CAR-T cells generated by the self-replicating RNA variants, the cells were co-cultured with CD19 expressing Nalm6 cells. The CAR-T cells co-expressing B18R or E3L were activated to roughly the same degree as CAR-T cells transfected with self-replicating RNA encoding only a CD19 CAR (see e.g., FIG. 32). This example demonstrates the ability to enhance the levels of expression and improve the functionality of the desired cargo via co-expression of additional proteins. The additional proteins are not limited to ones known to reduce the interferon response. They can be transcription factors, receptors, ligands, enzymes, etc. depending on the desired application.

### Example 8: Transfection of Cells with mRNA by Lipid Nanoparticle Delivery

[0929] As an example of delivery of the self-replicating RNA platform, lipid nanoparticles were developed to efficiently transfect T cells. Lipid nanoparticles were synthesized via a microfluidic mixing strategy and were composed of an ionizable lipid, helper lipid, cholesterol, PEG lipid linked to a functional group, and encapsulated RNA. After synthesis, the lipid nanoparticles were conjugated to a CD3 targeting antibody via click chemistry. To demonstrate the efficacy of this approach, Jurkat T cells were transfected with lipid nanoparticles containing firefly luciferase mRNA. The transfection was performed with unconjugated lipid nanoparticles or lipid nanoparticles conjugated to an anti-CD3 antibody or an isotype control antibody. To measure transfection efficacy, the cells were lysed with a commercial luciferase reagent and the resulting signal was read with a plate reader. It was observed that the lipid nanoparticles transfected the Jurkat T cells to a level comparable to electroporation (see e.g., FIG. 33).

### Example 9: Expression of a Mock Cargo/Reporter Protein in Cells for an Extended Duration without Genetic Modification

[0930] To demonstrate the versatility of this platform, self-replicating RNA expressing mCherry was developed. In this example, mCherry serves as a model cargo or reporter protein. The actual cargo can be a transcription factor that can result in phenotypic changes. The cargo can also be an enzyme used to modify the genome or transcriptome of the cell. Additionally, the cargo can act on a protein to inhibit or induce its function to alter the activity of the targeted cell. The self-replicating RNA encoding mCherry was transfected into Jurkat T cells. A majority of the cells expressed the mCherry protein at a high level over a period of at least 10 days (see e.g., FIG. 34). To further characterize the system, the self-replicating RNA encoding mCherry was transfected in human CD3+ primary T cells. Most of the cells expressed the mCherry protein at a high level over a period of at least 7 days (see e.g., FIG. 35). This time period is likely sufficient to result in a variety of desirable functions by expression of a cargo protein.

### Example 10: In Vitro Transcription of Fully Substituted Self-Amplifying RNA

[0931] Described herein are self-amplifying RNAs (saRNAs) comprising modified nucleotides. This example demonstrates the process for synthesis of fully (i.e., 100%) substituted saRNA (e.g., of a specific pyrimidine for a specific modified nucleotide, as described further herein). This example is schematically depicted in FIG. 36 with the bioactive result of this composition of matter schematically depicted in FIG. 37. In this example, a plasmid containing sequences for the DNA template of an saRNA encoding for NSP1-4 of VEEV and a fluorescent reporter, mCherry, as the cargos of interest was cloned in DH5α E. coli and purified using ZymoPURE™ II Plasmid Midiprep Kit (ZYMO RESEARCH). The promoter region was a CLEANCAP AU (TRILINK BIOTECHNOLOGIES) compatible T7 promoter (Promoter seq: TAATACGACTCACTATAAT; SEQ ID NO: 1). Plasmids were linearized with MluI-HF for 3 hours at 37° C., and linearized template was purified using QIAQUICK PCR Purification Kit (QIAGEN). saRNA was synthesized using MEGASCRIPT T7 Transcription kit (Invitrogen™, THERMOFISHER SCIENTIFIC) with 1p g template, co-transcriptional capping using CLEANCAP AU (final conc. 4 mM), and a 3 hour incubation (TRILINK BIOTECHNOLOGIES). The final concentration of all NTPs, either modified or unmodified, was 5 mM. IVT was followed by 10 min DNase treatment and 30 min post-transcriptional poly-adenylation using a Poly(A) Tailing Kit (Invitrogen™, THERMOFISHER SCIENTIFIC). saRNA was purified using MEGAclear™ Transcription Clean-up Kit (Invitrogen™ THERMOFISHER SCIENTIFIC) and eluted in DNase/RNase free H₂O prior to storing at −80° C. The A260 of all modified nucleoside triphosphates (modNTPs) was empirically determined using a NANODROP2000 (THERMOFISHER SCIENTIFIC). The adjusted factor for each modNTP was used to calculate RNA concentration to ensure consistent delivery between modNTPs. As a result, this example demonstrates that saRNA was successfully synthesized at 100% incorporation of modified nucleotides using established and common synthesis methods.

### Example 11: A Screen of 100% Substitution with Commercially Available Modified Nucleotides

[0932] This example demonstrates the unexpected result that specific nucleotides are capable of maintaining saRNA function when substituted at 100%. Individual IVT reactions were carried out to generate saRNA encoding a mCherry fluorescent reporter, produced as detailed in Example 10, with 100% substitution of a specific nucleotide (e.g., adenosine, cytosine, guanosine, or uridine) for each of the following modified nucleotides: 7-Deazaadenosine, N1-Methyladenosine, N6-Methyladenosine, 6-Chloropurineriboside, 2-Amino-6-chloropurineriboside, 2-Aminoadenosine, 5-Methoxycytidine, 5-Hydroxymethylcytidine, 5-Formylcytidine, 5-Aminoallylcytidine, 5-Methylcytidine, 5-Hydroxycytidine, Isoguanosine, Thienoguanosine, 2-Aminopurine-riboside, 8-Oxoguanosine, 5-Carboxymethylesteruridine, Thienouridine, 5-Methoxyuridine, 5-Carboxyuridine, 2-Thiouridine, 5-Methyluridine, N1-Propylpseudouridine, N1-Methoxymethylpseudouridine, N1-Ethylpseudouridine, N1-Methylpseudouridine, and Pseudouridine. All modified nucleotides were purchased from TRILINK BIOTECHNOLOGIES. HEK293T cells were plated at 80,000 cells/cm² and allowed to adhere overnight. Cells were transfected with 100 ng saRNA using MESSENGERMAX reagent; lipoplexes were prepared according to manufacturer's protocol (THERMO FISHER SCIENTIFIC). After 24 hours, cells were gently dissociated and fluorescence was assessed via flow cytometry. Unexpectedly, 5-methylcytidine, 5-hydroxymethylcytidine, and 5-methyluridine displayed equivalent or greater transfection efficiency compared to unmodified saRNA, while construct expression was maintained at appreciable levels (see e.g., FIG. 38 & FIG. 39). Without wishing to be bound by theory, given that 5-hydroxymethylcytidine and 5-methylcytidine both function similarly, it is expected that 5-methyluridine and 5-hydroxymethyluridine have similar functions, and that 5-hydroxymethyluridine can be used to substitute uridine in saRNA to increase transfection efficiency compared to unmodified saRNA. As a result, this example demonstrates that saRNA with 100% incorporation of modified nucleotides are capable of maintaining biological activity, an expected result.

### Example 12: The Initiating Nucleotide is Critical for saRNA Expression Intensity

[0933] This example demonstrates the unexpected result that the initiating nucleotide, the nucleotide directly 3′ of the cap structure is critical for saRNA function when substituted with modified nucleotides. In this example, saRNA encoding an mCherry fluorescent reporter were synthesized as detailed in Example 10 save for the addition of cap analog. Select modified nucleotides, specifically, 5-methylcytidine, 5-methyluridine, 5-hydroxymethycytidine, and N1-methylpseudouridine were incorporated into the saRNA at 100% substitution. Both ATP initiated (Promoter seq: TAATACGACTCACTATAAT; SEQ ID NO: 1) and GTP initiated (Promoter seq: TAATACGACTCACTATAGAT; SEQ ID NO: 8) variants were synthesized with each listed modified nucleotide. All saRNA were enzymatically capped using Faustovirus Capping Enzyme (FCE) to achieve a cap 0 structure, according to manufacturer's protocols. 10 μg of each saRNA were further enzymatically modified to Cap1 structure, according to manufacturer's protocols (NEW ENGLAND BIOLABS). HEK293T cells were plated at 80,000 cells/cm² and allowed to adhere overnight. Cells were transfected with 100 ng saRNA using MESSENGERMAX reagent; lipoplexes were prepared according to manufacturer's protocol (THERMO FISHER SCIENTIFIC). After 24 hours, cells were gently dissociated, and fluorescence was assessed via flow cytometry. The entire screen detailed in example 11 was repeated using ARCA capping instead of enzymatic capping. The transfection efficiencies were similar between ARCA and CLEANCAPAU capped constructs, but the expression intensity was markedly lower, indicating cap dependency to modified nucleotide efficacy and expression in saRNA (see e.g., FIG. 40-41). Cap0, ATP-initiated saRNA, synthesized via enzymatic capping, expressed at significantly higher median fluorescent intensity compared to equivalent GTP-initiated constructs (see e.g., FIG. 42). The transfection efficiency of ATP-initiated vs GTP-initiated constructs was equivalent between modified nucleotides (see e.g., FIG. 43). Cap1 saRNA displayed similar trends in median fluorescence intensity between ATP-initiated and GTP-initiated as Cap0, with a decrease in the magnitude of differential (see e.g., FIG. 44). The cap 1 saRNA displayed increased transfection efficiency in the GTP-initiated constructs; however, the median expression intensity was decreased in across all modified nucleotides (see e.g., FIG. 45). In conclusion, this example demonstrates the unexpected result that initiating nucleotide is important for the function of saRNA with and without modified nucleotides. Additionally, this indicates that the reason for previous work not identifying modified nucleotides was a result of cap 0, GTP-initiated saRNA displaying low expression intensity.

### Example 13: Suppression of Early Interferon Response in Human PBMCs

[0934] This example demonstrates the evasion of the early interferon response conferred to self-amplifying RNA through incorporation of modified nucleotides. In this example, PBMCs were isolated from apheresis collars, harvested from three unique human patients. Isolation was carried out according to manufacturer's protocol using SepMate™-50 columns containing LYMPHOPREP (STEMCELL TECHNOLOGIES). Isolated peripheral blood mononuclear cells (PBMCs) were either immediately used or stored in 90% Human AB serum+10% DMSO in a liquid nitrogen cryotank. PBMCs were rested overnight in Roswell Park Memorial Institute (RPMI) medium+10% fetal bovine serum (FBS)+1% penicillin and streptomycin (PS). Any monocytes that may have adhered to the tissue culture (TC) flask were gently dissociated using a sterile spatula. Individual donors were plated at 1 million cells/ml in 500 μl of complete media in 24 well plates. PBMCs were treated with 500 ng saRNA or mRNA, formulated in lipid nanoparticles (LNPs). Cells were cultured for 6 hours and 24 hours before assessing media and transcriptomic profiles of the given groups. The fully substituted self-amplifying RNA had a significantly lower elicited early interferon response than wild-type nucleotides (see e.g., FIG. 46 & FIG. 47). As a result, this example demonstrates that saRNA with 100% incorporation of modified nucleotides evades the early interferon response in human immune cells when compared to unmodified saRNA.

### Example 14: Fully-Modified Self-Amplifying RNA as Vaccines

[0935] Self-amplifying RNA represents an attractive modality for vaccination as it can elicit a much more robust immune response with lower necessary dose than traditional non-amplifying RNA. Fully-substituted self-amplifying RNA is even more attractive as a modality compared to self-amplifying RNA produced with unmodified nucleotides, because a vaccine antigen of interest can be expressed more potently in a patient with a lower dose. A fully-substituted self-amplifying RNA encoding a stabilized variant of the SARS-CoV-2 spike protein was produced by IVT from a linearized plasmid template. Unique saRNA IVT reactions were run with 100% substitution of 5-methylcytidine, 5-hydroxymethylcytidine, 5-methyluridine, N1-methylpseudouridine, and wild-type nucleotides. It was encapsulated in lipid nanoparticles under aseptic conditions and LNP size and polydispersity were characterized via dynamic light scattering (DLS). LNPs were dialyzed under sterile conditions in sterile 1× phosphate buffered saline (PBS). After dialysis, loading of fully-substituted saRNA into LNPs was assessed via adding RNA-binding fluorescent dye to samples with and without lytic surfactant. Mouse myoblast cells, C2C12s, were plated in 96 well TC coated plates and allowed to adhere overnight. Cells were dosed with saRNA at 100 ng/well with and without full-substitution of modified nucleotides. Expression was assessed via direct flow cytometry with an ALEXAFLUOR700 conjugated mAb against the SARS-CoV-2 spike protein (see e.g., FIG. 48 & FIG. 49). Fully-modified self-amplifying RNA encoding for the SARS-CoV-2 spike expressed on a large population of cells demonstrating a higher transfection efficiency, as well as expressed more potently on the cells induced, demonstrating higher vaccine antigen production. In conclusion, this unexpected result demonstrates that highly-substituted saRNA is capable of over-expressing a vaccine antigen of interest at comparable or greater expression than wild-type saRNA.

[0936] A healthy patient is dosed with 100 ng of highly-substituted self-amplifying RNA via intramuscular injection of LNP. The fully modified saRNA transfects cell populations broadly and over-expresses the vaccine antigen compared to unmodified saRNA at the same dose. Immune cells in the healthy patient's body are activated by the expression of the viral antigen and induce an immunization response capable of recognizing the viral antigen and rapidly mounting a protective response after future exposure. An equivalent dose of highly-substituted saRNA results in a more robust immune response than unmodified saRNA.

### Example 15: Cell Type Specific saRNA Expression Due to Modified Nucleotide

[0937] This example demonstrates that a novel property of cell-type specific saRNA expression can be conferred via the selection of a given modified nucleotide. saRNA encoding a stabilized variant of the SARS-CoV-2 spike protein was produced by IVT with 100% substitution of 5-methyluridine for uridine, in a manner similar to previously described (see e.g., Example 11). HEK293T (immortalized human embryonic kidney) cells were plated at 80,000 cells/cm², and C2C12 (immortalized mouse myoblast) cells were plated at 25,000 cells/cm² and allowed to adhere overnight. Cells were treated with 100 ng of saRNA encapsulated in LNPs and incubated for 24 hours. Expression was determined via flow cytometry staining for the spike protein expressed on the surface of cells. 5-methyluridine saRNA expresses at comparable or greater levels in HEK293T cells, but it does not express in C2C12 cells (see e.g., FIG. 50). This unexpected result demonstrates the cell type specific expression conferred to saRNA via the selection of a specific modified nucleotide.

### Example 16: Increased Expression of Highly-Substituted saRNA Compared to saRNA with Wild Type Nucleotides

[0938] This example demonstrates the unexpected result that saRNA substituted at greater than 25% with modified nucleotides increases the expression of a cargo of interest. saRNA encoding a fluorescent reporter protein were synthesized via IVT from linearized plasmid with 100% (see e.g., FIG. 51-56), 75%, 50%, 25% or 0% (see e.g., FIG. 55-56) substitution of cytidine with 5-methylcytidine (see e.g., FIG. 51-56) or uridine with N1-methylpseudouridine (see e.g., FIG. 55-56). Jurkat cells were grown in RPMI+10% FBS+1% PS and maintained between 5×10⁵ and 2×10⁶ cells/ml. Prior to transfection, the cells were washed with PBS and plated in fresh RPMI at 250,000 cells/well. LNPs containing saRNA with or without modified nucleosides were added dropwise to cells in triplicate at 250 ng/well. After 24 hours, a portion of the cells were harvested for flow analysis. The remainder of the cells were maintained in culture and assayed by flow at additional time points. Primary human CD3+ T cells were isolated by negative selection from peripheral blood and grown in RPMI+10% FBS+1% PS supplemented with 50 U/mL of IL2. To activate the cells, CD3/CD28 DYNABEADS were added to the cells at a 2:1 bead to cell ratio for 48 hours. After activation, the DYNABEADS were removed and the T cells were allowed to recover for 24 hours before transfection. Primary T cells were washed with PBS and plated at 250K/well in RPMI+10% FBS supplemented with 50 U/mL IL2. To transfect, anti-CD3 conjugated LNPs were dosed in triplicate at 1 μg/well. CD3+ T cells treated with 5-methylcytidine substituted saRNA demonstrated significantly increased expression of the cargo of interest compared to unmodified saRNA (see e.g., FIG. 51). Additionally, CD3+ T cells demonstrated sustained expression of the cargo (see e.g., FIG. 52). Jurkat (immortalized human T lymphocyte) cells treated with 5-methylcytidine substituted saRNA demonstrated significantly increased expression of the cargo of interest compared to unmodified saRNA (see e.g., FIG. 53). Additionally, Jurkat cells demonstrated sustained expression of the cargo (see e.g., FIG. 54). Jurkat cells treated with 5-methylcytidine or N1-methylpseudouridine substituted saRNA at increasing ratios demonstrated a substitution-dependent activity. Increasing the nucleotide substitution percentage above 25% increased the expression of the cargo of interest with 5-methylcytidine, but decreased expression with N1-methylpseudouridine (see e.g., FIG. 55). The early interferon response, as determined by IFN-β0l gene expression in PBMCs, treated as previously described (see e.g., Example 13), demonstrated that 100% substitution was the only condition where gene expression was not significantly increased compared to the untransfected control cell population (see e.g., FIG. 56). In conclusion, the unexpected results of these experiments were the discovery of increased expression of the cargo of interest at substitution with 5-methylcytidine at substitution ratios greater than 25% in various cell types, over extended periods of time.

### Example 17: Self-Amplifying CAR T Cells, Generated In Situ

[0939] Self-amplifying RNA represents an attractive modality for long term expression of immunomodulatory therapies such as antibodies or chimeric antigen receptor T cells therapy. The expression of CAR is too short for sustained therapeutic effect when traditional mRNA is utilized and as a result, multiple injections are required. Additionally, the cell surface density of expressed CAR from traditional mRNA is often below therapeutic levels. Self-amplifying RNA extends the length of expression compared to non-replicating mRNA. However, self-amplifying RNA without nucleotide modification are difficult to transfect into the cell populations of interest, CD3+ T cells. They effectively do not take up self-amplifying RNA due to the early interferon immune response. Fully-modified saRNA allowed for transfection of larger cell populations to enable therapeutic effect. A fully-substituted self-amplifying RNA encoding an anti-CD19 chimeric antigen receptor with a mCherry fluorescent reporter was produced by IVT from a linearized plasmid template. It was encapsulated in lipid nanoparticles under aseptic conditions. Post insertion of a DSPE-PEG-anti-CD3 mAb complex was accomplished at room temperature and LNP size and polydispersity were characterized via dynamic light scattering. LNPs were dialyzed under sterile conditions in sterile 1×PBS. After dialysis, loading of fully-substituted saRNA into LNPs was assessed via adding RNA-binding fluorescent dye to samples with and without lytic surfactant. CD3+ T cells were selectively enriched from PBMCs, which were isolated from apheresis collars. Simultaneous isolation and enrichment was carried out using SepMate™-50 columns containing Lymphoprep™ and RosetteSep™ Human T Cell Enrichment Cocktail (STEMCELL TECHNOLOGIES). Isolated T cells were either immediately used or stored in 90% Human AB serum+10% DMSO in a liquid nitrogen cryotank. After thawing, T cells were rested overnight in T cell media and then plated at 1 million (M) cells/ml. T cells were activated prior to dosing with saRNA via LNPs at 100 ng/1×10⁵ T cells. Transfection was assessed via flow cytometry for mCherry as well as for cell surface expression of the CAR via direct flow cytometry with an anti-V5 antibody. Fully modified saRNA was capable of transfecting CD3+ T cells using multiple different ionizable lipids, with an increase in expression as a result of targeting (see e.g., FIG. 57). In conclusion, the unexpected result of this experiment is that saRNA 100% substituted with 5-methylcytidine for cytidine was able to transfect a larger population of cells and express anti-CD19 chimeric antigen receptor at higher levels than an equivalent dose of unmodified saRNA.

[0940] A cancer patient is intravenously injected with LNPs containing fully-modified saRNA encoding for a chimeric antigen receptor against an applicable target for their cancer. The LNPs are coupled with a targeting moiety to an immune cell of interest. Such an immune cell of interest includes, but is not limited to, T cells, NK cells, Macrophages, and B cells. In the event that CD3+ T cells are targeted, the fully-modified saRNA will transfect into the T cells, and begin expression of the CAR. Upon recognition of the target antigen of interest, the T cell will be stimulated to expand. As the T cell expands, the self-amplifying RNA will propagate throughout the T cell population with a lower rate of dilution that is seen in non-replicating RNA.

### Example 18: Fully Modified saRNA Encoding for Protein Replacement Therapies

[0941] For conditions resulting from deficiencies of proteins or enzymes, replacement by messenger RNA is an attractive therapeutic option. The deficient protein or enzyme is expressed from the messenger RNA to improve the condition. The utilization of self-replicating RNA allows for decreased frequency of treatment. By enhancing the expression of the self-replicating RNA through the use of modified nucleotides, a similar therapeutic effect can be achieved with less frequent or lower doses.

### Example 19: Highly Substituted Self-Amplifying RNA for Vaccination to Induce an Anti-Cancer Response

[0942] This example details the use of highly substituted self-amplifying RNA as a mechanism to elicit a protective or therapeutic response against tumor antigens. To trigger a strong anti-cancer reaction, immunostimulatory vaccines encode neoantigens that come from patient-specific or tumor-specific mutations. Identification of patient-specific neoantigens involves sequencing a patient's tumor genome to detect mutations and predict which ones will lead to stable peptide-major histocompatibility complex (MHC) interactions. Identification of tumor-specific mutations involves sequencing a particular tumor derived from a conserved class of cancer across many patients to identified conserved mutations. Once the antigens are identified, highly substituted self-amplifying RNA is synthesized by in vitro transcription. For the case of multiple antigen vaccination, the highly substituted self-amplifying RNA is a polycistronic RNA or multiple monocistronic RNAs. The RNA is formulated into a pharmaceutical composition capable of transfection inside the body. Due to the highly substituted nature of the self-amplifying RNA, a lower dose is administered compared with unmodified self-replicating RNA or modified non-replicating RNA. To enhance efficacy of antigen RNA(s), the self-amplifying RNA can be co-administered with synergistic therapeutics (RNA, small-molecules, checkpoint inhibitors) to increase dendritic cell activation, antigen presentation, and T cell function. In conclusion, this example details the use of highly substituted self-amplifying RNA as a cancer vaccine.

### Example 20: Complete Substitution with Modified Nucleotides Suppresses the Early Interferon Response and Increases the Potency of Self-Amplifying RNA

[0943] Self-amplifying RNA (saRNA) can be used as vaccines and in situ therapeutics that permit protein expression for longer duration at lower doses, e.g., as compared to other RNA therapies. However, a major barrier to saRNA efficacy is the potent early interferon response triggered upon cellular entry, resulting in saRNA degradation and translational inhibition. Substitution of mRNA with modified nucleotides (modNTPs), such as N1-methylpseudouridine (N1mΨ), reduce the interferon response and enhance expression levels. Multiple attempts to use modNTPs in saRNA have been unsuccessful, leading to the conclusion that modNTPs are incompatible with saRNA, thus hindering further development. Here, contrary to the common dogma in the field, multiple modNTPs were identified that when incorporated into saRNA at 100% substitution confer immune evasion and enhance expression potency. Transfection efficiency enhances by roughly an order of magnitude in difficult-to-transfect cell types compared to unmodified saRNA, and interferon production reduces by >8 fold compared to unmodified saRNA in human peripheral blood mononuclear cells (PBMCs). Furthermore, expression of viral antigens were demonstrated in vitro, and significant protection was observed against lethal challenge with a mouse-adapted SARS-CoV-2 strain in vivo. A modified saRNA vaccine, at 100-fold lower dose than a modified mRNA vaccine, resulted in a statistically improved performance to unmodified saRNA and statistically equivalent performance to modified mRNA. This discovery considerably broadens the scope of self-amplifying RNA, permitting entry into previously impossible cell types, as well as the ability to apply saRNA technology to non-vaccine modalities such as cell therapy and protein replacement.

### Introduction

[0944] The original discovery of the application of modified nucleotides (modNTPs) to mRNA by Karikó and Weissman revolutionized RNA medicine. This breakthrough permitted rapid development and deployment of mRNA vaccines against Severe acute respiratory syndrome coronavirus 2 (SARS-CoV-2), saving millions of lives. Chemically modified nucleotides enhance mRNA stability, transfection capability, and decrease immunogenicity. Without modNTPs, detection of exogenous RNA activates toll-like receptors (TLRs) and triggers the production of type I interferons, resulting in translational shutoff and systemic inflammation. In the cytosol, retinoic acid-inducible gene 1 (RIG1) and RNA-dependent protein kinase (PKR) recognize RNA and trigger additional interferon production. Clinically approved mRNA vaccines utilize N1-methylpseudouridine (N1mΨ) to mitigate these responses and improve efficacy. Although effective, the inherent short half-life of mRNA necessitates a large dose to be effective, which increases risk of adverse side effects and limits accessibility. Therefore, efforts to further enhance the expression and durability of RNA-based medicine at lower doses has unlocked new therapeutic applications, improved tolerability, and expanded global access.

[0945] Self-amplifying RNAs (saRNAs) undergo replication and amplification, inside the cell, to afford robust and durable expression of an encoded cargo. saRNA are a platform capable of addressing the shortcomings of mRNA by decreasing the dose of vaccines and administration frequency of protein-encoding therapeutics. Decreasing doses mitigate vaccine related side effects and reduce the occurrence of rare but serious adverse events. Additionally, order-of-magnitude reductions in dose requirements significantly bolsters the manufacturing capacity to enhance production speed and democratize the distribution of vaccines against emerging pathogens. However, early clinical evidence from saRNA vaccine trials show decreased efficacy and reduced neutralizing antibody levels compared to mRNA; see e.g., Low et al., NPJ Vaccines, 2022. 7(1): p. 161, the content of which is incorporated herein by reference in its entirety. The early and intense activation of the type I interferon response induced by saRNA detection hinders replication and antigen expression; see e.g., Minnaert et al., Adv Drug Deliv Rev, 2021. 176: p. 113900; Zhong et al., Mol Ther, 2021. 29(4): p. 1370-1381; Ong et al., NPJ Vaccines, 2022. 7(1): p. 154; Pepini et al., J Immunol, 2017. 198(10): p. 4012-4024; the contents of each of which are incorporated herein by reference in their entireties. Strategies to decrease the immunogenicity of saRNA are urgently needed to permit further clinical development and translation.

[0946] Prior efforts to decrease the immunogenicity of saRNA focus largely on sequence evolution, co-expression of viral inhibitory proteins, and optimization of the delivery vehicle; see e.g., Li et al., Sci Rep, 2019. 9(1): p. 6932; Blakney et al., Mol Ther, 2021. 29(3): p. 1174-1185; Kimura et al., Mol Ther, 2023. 31(8): p. 2360-2375; the contents of each of which are incorporated herein by reference in their entireties. While useful in their respective applications, all prior approaches fail to achieve a universal method of mitigating the interferon response and improving saRNA expression. The best tools for such improvements are modNTPs. However, the current understanding of the field is that the incorporation of modNTPs into saRNA abrogates downstream efficacy, as reported by multiple independent groups; see e.g., Minnaert et al., Adv Drug Deliv Rev, 2021; Kairuz et al., Front Immunol, 2022. 13: p. 1018961; Voigt et al., NPJ Vaccines, 2022. 7(1): p. 136; Beissert et al., Mol Ther, 2020. 28(1): p. 119-128; Geall et al., RNA Containing Modified Nucleotides and Use Thereof in Vaccines 2010; Erasmus et al., Mol Ther Methods Clin Dev, 2020. 18: p. 402-414; the contents of each of which are incorporated herein by reference in their entireties. Thus, modified nucleotides are not currently viewed as a viable strategy to decrease immunogenicity.

[0947] A hypothesis for this observed incompatibility is the alteration of vital saRNA secondary structures; see e.g., Kairuz et al., Front Immunol, 2022. 13: p. 1018961; Helm, Nucleic Acids Res, 2006. 34(2): p. 721-33; the contents of each of which are incorporated herein by reference in their entireties. saRNAs traditionally utilize alphavirus sequences, replacing the structural genes with the genes encoding the cargo(s) of interest; see e.g., Bloom et al., Gene Ther, 2021. 28(3-4): p. 117-129; the contents of which are incorporated herein by reference in its entirety. The resulting synthetic construct encodes both an RdRp and the cargo(s) on the same RNA strand. Once expressed, the RdRp recognizes conserved sequence elements (CSEs) at the 5′ and 3′ ends to permit transcription of full-length copies of the entire saRNA construct. Later in its lifecycle, the RdRp complex also recognizes a sub-genomic promoter (SGP) to permit amplification of a truncated transcript encoding the cargo(s). The incorporation of modified nucleotides alters the stability or accessibility of specific base pairs, changes hydrogen bonding patterns, and/or shifts RNA hydrophobicity to stabilize or inhibit RNA-protein interactions; see e.g., Kierzek et al., Nat Commun, 2022. 13(1): p. 1271; Harcourt et al., Nature, 2017. 541(7637): p. 339-346; Davis, Nucleic Acids Res, 1995. 23(24): p. 5020-6; the contents of each of which are incorporated herein by reference in their entireties. Incorporating specific modNTPs, like N1mΨ may alter CSE or SGP structure and prevent effective RdRp recognition.

[0948] Described herein is the unexpected finding that several modified nucleotides at 100% substitution are compatible with saRNA and enhance its resulting in vitro and in vivo performance. A screen to identify modified modNTPs incorporated into a functional saRNA reporter system revealed two cytidine and one uridine modNTPs with activity greater than unmodified saRNA, while the vast majority of modNTPs, notably N1-methylpseudouridine (N1mΨ), yielded minimal transfection. Modified saRNA resulted in a decreased type I interferon response in primary human peripheral blood mononuclear cells (PBMCs) and increased reporter expression in several cell lines. In a challenge study of SARS-CoV-2, the modified saRNA provided protection at significantly lower doses than modified mRNA and greater efficacy than unmodified saRNA.

### Results

Described Herein is the Identification of Modified Nucleotides Capable of Maintaining saRNA Activity.

[0949] A library of saRNA constructs was synthesized through in vitro transcription (IVT), where all nucleotides were completely substituted with modified counterparts. To assess their functionality, these constructs encoded an mCherry reporter and were transfected into HEK293 cells by cationic lipofection (see e.g., FIG. 58B). Three modNTPs were identified that imparted significantly elevated transfection efficiencies compared to the N1-methylpseudouridine (N1mΨ) modified construct that resulted in minimal transfection. Flow cytometry analysis (see e.g., FIG. 58C, 58D) and live cell microscopy (see e.g., FIG. 58D) revealed that constructs with complete substitution of 5-hydroxymethylcytidine (5OHmC), 5-methylcytidine (5mC), or 5-methyluridine (5mU) exhibited transfection efficiencies 14-fold, 10-fold, and 8-fold higher, respectively, in comparison to the N1mΨ modified construct. The transfection efficiencies for the identified modNTPs were equal to or greater than the wildtype unmodified control (see e.g., FIG. 61A). Notably, in the HEK293 cells transfected by lipofection for high-throughput screening, the mean cargo expression intensity was reduced compared to the wild-type construct for 5OHmC and 5mC (see e.g., FIG. 61B). Substitution with the identified modNTPs resulted in functional constructs when synthesized with Cap-0 structures (ARCA) or Cap-1 structures (CLEANCAP AU). However, a significant increase in expression intensity was observed when constructs contained a Cap-1 structure (see e.g., FIG. 61D).

Enhanced Expression Resulting from saRNA Modification was Observed Across Diverse Cell Types In Vitro.

[0950] Following the demonstrated functionality of fully substituted saRNA, further investigations were conducted of the activity of the saRNA in vitro. To assess the overall protein expression resulting from transfection with WT saRNA, 5mC saRNA, and N1mΨmRNA, a luciferase-based reporter construct was employed. These constructs were loaded into lipid nanoparticles (LNPs). HEK293 and C2C12 cells were transfected with LNPs containing 10 ng of RNA. Notably, the 5mC modified saRNA exhibited a remarkable 4.9-fold increase in expression over WT saRNA, corresponding to a substantial 68-fold increase in expression over the N1mΨmRNA in HEK293 cells (see e.g., FIG. 58E). In C2C12 cells, a 3.5-fold increase in expression was observed for the 5mC modified saRNA, resulting in a 314-fold increase compared to the N1mΨmRNA, which resulted in limited expression at the low dosage administered (see e.g., FIG. 58F). A dose response experiment in HEK cells showed significantly improved expression at doses as low as 1 ng (see e.g., FIG. 62A). Next, transfection experiments were conducted with the modified saRNA in Jurkat T cells, a notoriously hard to transfect cell line by mRNA containing LNPs. To assess the expression profile at the individual cell level, an mCherry reporter was employed combined with flow cytometry analysis. A significant 17.8-fold improvement in transfection efficiency was observed at the lower dose of 25 ng, and a 7.8-fold enhancement was observed at the higher dose of 250 ng (see e.g., FIG. 58G, FIG. 62B, FIG. 62C). A similar expression profile was observed when the luciferase constructs were transfected at 250 ng (see e.g., FIG. 62D). In a time course study, the expression was durable over 7 days from the modified saRNA in Jurkat cells (see e.g., FIG. 58I, FIG. 62E). To assay the impact of fully substituted saRNA in primary cells, CD3+ T cells derived from three different human donors were treated with saRNA loaded-LNPs. All donors exhibited a 5-fold to 6-fold increase in transfection efficiency and significant expression of the mCherry reporter gene. This increase corresponded to approximately 1%-3% transfection efficiency for the wild-type (WT) saRNA and approximately 10-20% for the 5mC-modified saRNA (see e.g., FIG. 58H, FIG. 63A, FIG. 63B). The expression of the mCherry reporter was detected for at least 5 days (see e.g., FIG. 63B).

Reduced Interferon Response from Modified saRNA in Human PBMCs was Observed.

[0951] To characterize the interferon response caused by wildtype or modified saRNA, human peripheral blood mononuclear cells (PBMCs) from three distinct donors were cultured with lipid nanoparticles (LNPs) loaded with saRNA (see e.g., FIG. 59B). Gene expression analysis revealed that saRNA treatment induced a significant increase in the expression of early interferon-related genes, namely IFN-α1, IFN-α2, and IFN-β1, after 6 hours (see e.g., FIG. 59C-59E). However, when 5OHmC or 5mC are incorporated, there was a large reduction in the expression of these early IFN genes. Specifically, IFN-α1 and IFN-β1 exhibited a reduction of more than 8.5-fold, while IFN-α2 showed a reduction of over 3-fold. The saRNA containing N1mΨ afforded lower intensity and efficiency in expressing the reporter cargo (see e.g., FIG. 58C). The analysis of IFN-α subtypes in media from a single donor (see e.g., FIG. 59F) was consistent with the gene expression analysis. Additionally, a longitudinal analysis of human IFN-β in media indicated that modNTP saRNA effectively suppressed IFN-β expression. In all donors, no detectable expression of IFN-β was observed after 5mC and N1mΨsaRNA treatment, and only one donor exhibited detectable levels of IFN-β after 5OHmC saRNA treatment (see e.g., FIG. 59G).

Described Herein is the Development and Validation of a Low-Dose Modified saRNA SARS-CoV-2 Vaccine.

[0952] Next, non-replicating mRNA (Spike mRNA) and self-amplifying RNA (Spike saRNA) were generated encoding a K986P and V987P stabilized spike protein of SARS-CoV-2 derived from the Wuhan-1 strain (see e.g., FIG. 60A; see e.g., SEQ ID NOs: 21-22). The constructs were assembled by in vitro transcription. These RNAs were transfected into HEK and C2C12 cells via LNPs. In HEK cells, saRNA modified with 5OHmC, 5mC, and 5mU exhibited approximately twice the protein expression compared to wildtype saRNA, as assessed by flow cytometry (see e.g., FIG. 60B). Consistent with previous findings, N1mΨ modification of saRNA resulted in suppressed expression. In C2C12 cells, both 5OHmC and 5mC modifications significantly improved transfection efficiency, leading to approximately 2-fold higher protein expression than the unmodified saRNA construct and approximately 8-fold higher protein expression than N1mΨ modified non-replicating mRNA (see e.g., FIG. 60C, 60D, FIG. 64A). These findings were further supported by Enzyme Linked Immunosorbent Assay (ELISA) analysis, which confirmed enhanced protein expression for the modified saRNA constructs (see e.g., FIG. 64B). The 5mU modification did not result in protein expression in C2C12 cells. Similar in vitro experiments were performed to evaluate the expression of the flu hemagglutinin (HA) antigen, and an expression profile consistent with previous experiments was observed (see e.g., FIG. 64C+64D).

[0953] Following the successful antigen expression observed in vitro, the effectiveness of a modified saRNA vaccine was evaluated against SARS-CoV-2 infection. C57BL/6 mice (5 male and 5 female) were intramuscularly (i.m.) administered 10 ng, 100 ng, and 1000 ng of WT Spike saRNA or 5mC Spike and boosted at 35 days post initial vaccination (see e.g., FIG. 60E); assuming mouse weight of approximately 20 g, such doses equate to 5×10⁻⁴ mg/kg, 5×10⁻³ mg/kg, and 5×10⁻² mg/kg, respectively. As positive and negative controls, additional groups received 1000 ng of N1mΨ non-replicating mRNA or vehicle (PBS), respectively. To assess the early interferon response in mice, serum was collected from mice vaccinated with the 1000 ng dose at 24 hours and 48 hours. The mice vaccinated with WT saRNA exhibited significantly increased levels of serum IFN-α1 compared to N1mΨ or 5mC saRNA vaccinated mice. Conversely, mice receiving N1mΨ mRNA or 5mC saRNA displayed significantly reduced levels of serum IFN-α1, indicating a decrease in Toll-like receptor (TLR) signaling attributable to the modified nucleotides. By 48 hours post vaccination, IFN-α1 was no longer detectable in the serum of any mice (see e.g., FIG. 60F). Across all samples, IFN-β was not detectable at 24 hours or 48 hours (see e.g., FIG. 65A). On day 35, 14 days after the final vaccination, the mice were infected intranasally with 1×10⁵ plaque-forming units (PFU) of mouse adapted SARS-CoV-2 (MA30); see e.g., Dinnon et al., Nature, 2020. 586(7830): p. 560-566, the content of which is incorporated herein by reference in its entirety. The mice vaccinated with either WT Spike saRNA or 5mC Spike saRNA at 100 ng and 1000 ng showed 100% survival and minimal weight loss (see e.g., FIG. 65B, FIG. 60H). However, mice receiving the 10 ng dose of WT Spike saRNA showed severe weight loss and 50% lethality. In contrast, mice vaccinated with the 10 ng dose of 5mC demonstrated only 10% lethality, a statistically significant improvement in survival compared to WT Spike saRNA (see e.g., FIG. 60G+60H).

### Discussion

[0954] As a technology, self-amplifying RNA permits lower dose vaccines and off-the-shelf, in situ, long-lasting, and non-integrating cell and gene therapies. Unfortunately, the clinical reality thus far paints a less encouraging picture. Despite success in preclinical models, saRNA vaccines show reduced seroconversion in human trials (see e.g., Low et al., 2022, supra). An analysis of gene expression in vaccinated humans reveals sharp activation of the innate immune system (see e.g., Ong et al., 2022, supra). Preclinical and clinical data also confirm that the early and intense interferon response inhibits antigen expression (see e.g., Minnaert et al., 2021, supra; Zong et al., 2021, supra; Pepini et al., 2017, supra; Zhong et al., Vaccines (Basel), 2019. 7(3); the contents of each of which are incorporated herein by reference in their entireties). A mechanism to evade the early interferon response and improve saRNA transfection, e.g., as shown by the modified saRNAs described herein, unlocks the true potential of the saRNA platform.

[0955] Prior strategies to enhance the efficacy of saRNA focus on reducing the innate immune response by optimizing the sequence, encoded cargo, and delivery vehicle. Evolved RdRp variants capable of decreasing the interferon response enhanced the anti-tumor efficacy of an IL2 encoding saRNA (see e.g., Ong et al., 2022, supra). Evolution of the RdRp sequence can affect performance in contexts beyond intratumoral immunotherapy. Co-expression of viral proteins that block the interferon response results in improved titers in a vaccine against Rabies virus (RABV) (see e.g., Blakney et al., 2021, supra). Without wishing to be bound by theory, it is expected that this strategy will enhance activity only in cell types lacking robust TLR sensing that are amenable to saRNA transfection. In the context of vaccination, the delayed interferon response resulting from cytosolic sensors likely has an adjunctive effect. For therapeutics, it can be desirable for saRNA constructs to evade TLR detection and to inhibit the downstream interferon response triggered by cytosolic sensors. In addition, a localizing cationic nanocarrier formulation (LION) limited the delivery of saRNA to the injection site and thereby decreased the systemic type I interferon response (see e.g., Kimura et al., 2023, supra). Dependency on the cationic delivery vehicle can pose challenges in achieving efficient delivery to specific tissue or cell types, potentially requiring higher doses, and thereby imposing constraints on its broader therapeutic applications. In sum, previous work demonstrates need for a universal approach to control the interferon response and improve saRNA translation.

[0956] One tool for suppression of the interferon response in non-replicating RNA therapeutics is the incorporation of modified nucleotides, as exemplified by N1mΨ modified mRNA. The current understanding in the field is that modified nucleotides (modNTPs) are incompatible with saRNA and that saRNA performance decreases proportional to incorporation percentage. In fact, multiple studies report the failure of modified saRNA, since the first discovery of the impact of modified nucleotides on mRNA (see e.g., Minnaert et al., 2021, supra; Kairuz et al., 2022, supra; Voigt et al., 2022, supra; Beissert et al., 2020, supra; Geall et al., 2010, supra; Erasmus et al., 2020, supra; Pollock et al., EClinicalMedicine, 2022. 44: p. 101262; Blakney et al., J Control Release, 2019. 304: p. 65-74; Papukashvili et al., Int J Mol Sci, 2022. 23(21); Kairuz et al., Pharmaceutics, 2023. 15(4); Deering et al., Expert Opin Drug Deliv, 2014. 11(6): p. 885-99; the contents of each of which are incorporated herein by reference in their entireties). It was hypothesized that modified nucleotides compatible with saRNA exist, considering the numerous RNA modifications observed in eukaryotic cells and their ubiquitous presence in RNA viruses; see e.g., Tong et al., Front Microbiol, 2022. 13: p. 845625, the content of which is incorporated herein by reference in its entirety.

[0957] Described herein is evidence of biologically active, fully substituted self-amplifying RNA containing 5OHmC, 5mC, or 5mU. These three modNTPs maintained saRNA activity at levels equal to or greater than an unmodified construct (see e.g., FIG. 58). These identified modified nucleotides significantly enhanced transfection efficiency in HEK293, C2C12, and Jurkat cells (see e.g., FIG. 58). This potentiation translated to transgenes in T cells (see e.g., FIG. 58) and vaccine antigens in muscle cells (see e.g., FIG. 60, FIG. 64). Significantly reduced expression of type I interferons occurred in transfected human PBMCs in vitro (see e.g., FIG. 59) and systemically in vivo (see e.g., FIG. 60). The significant reduction in serum IFN-α levels demonstrated diminished systemic immunogenicity, a factor frequently acknowledged as the primary remaining limitation associated with saRNA. Extensive in vitro and in vivo validation of a modNTP substituted saRNA vaccine candidate provided proof-of-concept for enhanced clinical efficacy. In a lethal challenge study, just 10 ng of modNTP substituted saRNA performed statistically better than unmodified saRNA, demonstrating the ability to use modified saRNA as an ultra-low dose vaccine platform (see e.g., FIG. 60). Studies presented in this work indicate that modified self-amplifying RNA are a platform technology capable of revolutionizing modem RNA therapeutics.

[0958] The discovery of modNTPs capable of maintaining saRNA functionality is a major step towards a deeper understanding of alphavirus transcriptional activity and control. Results here demonstrate that RdRp transcriptional activity is maintained with the incorporation of specific modNTPs but lost with modNTPs such as N1mΨ. The observation of launch from fully modified saRNA means the two events are still occurring: (1) cap-dependent translation of the RdRp, and (2) the RdRp continues to recognize at least some of the conserved elements required for negative strand synthesis. Negative strand synthesis occurs intracellularly, and as a result, only wild type nucleotides will be incorporated into the new negative strand. Taking this and the results from N1mΨ saRNA together indicate that modNTPs primarily impact RdRp-saRNA interaction, and not the initial cap-dependent translation event. Additionally, the compatibility of 5-methyluridine in HEK293 cells but not in C2C12 cells indicates a epitranscriptomic discrepancy and mechanism of cell-type specificity.

[0959] In conclusion, this work presents a significant advancement to the field of self-amplifying RNA, and RNA therapeutics more broadly. Described herein is an embodiment of fully substituted self-amplifying RNA with enhanced function, which goes against the thinking of the field. Modified nucleotides are shown herein to overcome the major barrier to successful translation of saRNA into the clinic, which is the early interferon response preventing launch and production of cargo proteins. This discovery considerably broadens the scope of self-amplifying RNA, permitting entry into previously impossible cell types, as well as the ability to apply saRNA technology to non-vaccine modalities such as cell therapy and protein replacement.

### Materials and Methods

### Template Design and Synthesis

[0960] All mRNA and saRNA templates described in this Example took the form of linearized plasmid DNA. All templates were generated from a plasmid encoding NSP1-4 of the Venezuela Equine Encephalitis virus under either a CLEANCAP AU (TRILINK BIOTECHNOLOGIES) compatible T7 promoter (Promoter seq: TAATACGACTCACTATAGAT; SEQ ID NO: 8) or a GTP/ARCA compatible T7 promoter (Promoter seq: TAATACGACTCACTATAGGAT; SEQ ID NO: 12). Antigen sequences are as follows: Influenza A Hemagglutinin (Influenza A virus (A/California/07/2009(H1N1)), NCBI Ref Seq: YP_009118626.1; see e.g., SEQ ID NO: 13), Human respiratory syncytial virus Fusion glycoprotein (Human respiratory syncytial virus (RSV) (subtype A, strain A2), GenBank: AQZ26655.1; see e.g., SEQ ID NO: 14) SARS-CoV-2 Spike (Wuhan-Hu-1, NCBI Ref Seq: YP_009724390.1; see e.g., SEQ ID NO: 15) with K986P and V987P stabilizing mutations (see e.g., SEQ ID NO: 16, SEQ ID NO: 22). Plasmids were cloned in DH5a E. coli. Plasmids were purified using ZymoPURE™II Plasmid Midiprep Kit (Zymo Research), linearized with MluI-HF for 3 hours at 37° C., and purified using QIAQUICK PCR Purification Kit (QIAGEN).

SEQ ID NO: 13, Influenza A Hemagglutinin (Influenza A virus
(A/California/07/2009(H1N1))), NCBI Ref Seq: YP_009118626.1,
566 amino acids (aa):
MKAILVVLLYTFATANADTLCIGYHANNSTDTVDTVLEKNVTVTHSVNLLEDKHNGKLCKLRG
VAPLHLGKCNIAGWILGNPECESLSTASSWSYIVETPSSDNGTCYPGDFIDYEELREQLSSVSSFER
FEIFPKTSSWPNHDSNKGVTAACPHAGAKSFYKNLIWLVKKGNSYPKLSKSYINDKGKEVLVLW
GIHHPSTSADQQSLYQNADAYVFVGSSRYSKKFKPEIAIRPKVRXXEGRMNYYWTLVEPGDKITF
EATGNLVVPRYAFAMERNAGSGIIISDTPVHDCNTTCQTPKGAINTSLPFQNIHPITIGKCPKYVKS
TKLRLATGLRNIPSIQSRGLFGAIAGFIEGGWTGMVDGWYGYHHQNEQGSGYAADLKSTQNAID
EITNKVNSVIEKMNTQFTAVGKEFNHLEKRIENLNKKVDDGFLDIWTYNAELLVLLENERTLDY
HDSNVKNLYEKVRSQLKNNAKEIGNGCFEFYHKCDNTCMESVKNGTYDYPKYSEEAKLNREEI
DGVKLESTRIYQILAIYSTVASSLVLVVSLGAISFWMCSNGSLQCRICI
SEQ ID NO: 14, Human respiratory syncytial virus Fusion glycoprotein
(Human respiratory syncytial virus (RSV) (subtype A, strain A2)),
GenBank: AQZ26655.1, 574 aa:
MELPILKANAISTILAAVTLCFASSQNITEEFYQSTCSAVSKGYLSALRTGWYTSVITIELSNIKENK
CNGTDAKVKLIKQELDKYKNAVTELQLLMQSTPAANSRARRELPRFMNYTLNNTKNTNVTLSK
KRKRRFLGFLLGVGSAIASGIAVSKVLHLEGEVNKIKSALLSTNKAVVSLSNGVSVLTSKVLDLK
NYIDKQLLPIVNKQSCSISNIETVIEFQQKNNRLLEITREFSVNAGVTTPVSTYMLTNSELLSLIND
MPITNDQKKLMSSNVQIVRQQSYSIMSIIKEEVLAYVVQLPLYGVIDTPCWKLHTSPLCTTNTKE
GSNICLTRTDRGWYCDNAGSVSFFPQAETCKVQSNRVFCDTMNSLTLPSEVNLCNIDIFNPKYDC
KIMTSKTDVSSSVITSLGAIVSCYGKTKCTASNKNRGIIKTFSNGCDYVSNKGVDTVSVGNTLYY
VNKQEGKSLYVKGEPIINFYDPLVFPSDEFDASISQVNEKINQSLAFIRKSDELLHNVNAGKSTTNI
MITTIIIVIIVILLALIAVGLLLYCKARSTPVTLSKDQLSGINNIAFSN
SEQ ID NO: 15, SARS-CoV-2 Spike, also referred to as a surface
glycoprotein, Wuhan-Hu-1, NCBI Ref Seq: YP_009724390.1, 1273 aa:
MFVFLVLLPLVSSQCVNLTTRTQLPPAYTNSFTRGVYYPDKVFRSSVLHSTQDLFLPFFSNVTWF
HAIHVSGTNGTKRFDNPVLPFNDGVYFASTEKSNIIRGWIFGTTLDSKTQSLLIVNNATNVVIKVC
EFQFCNDPFLGVYYHKNNKSWMESEFRVYSSANNCTFEYVSQPFLMDLEGKQGNFKNLREFVF
KNIDGYFKIYSKHTPINLVRDLPQGFSALEPLVDLPIGINITRFQTLLALHRSYLTPGDSSSGWTAG
AAAYYVGYLQPRTFLLKYNENGTITDAVDCALDPLSETKCTLKSFTVEKGIYQTSNFRVQPTESI
VRFPNITNLCPFGEVFNATRFASVYAWNRKRISNCVADYSVLYNSASFSTFKCYGVSPTKLNDLC
FTNVYADSFVIRGDEVRQIAPGQTGKIADYNYKLPDDFTGCVIAWNSNNLDSKVGGNYNYLYRL
FRKSNLKPFERDISTEIYQAGSTPCNGVEGFNCYFPLQSYGFQPTNGVGYQPYRVVVLSFELLHAP
ATVCGPKKSTNLVKNKCVNFNFNGLTGTGVLTESNKKFLPFQQFGRDIADTTDAVRDPQTLEILD
ITPCSFGGVSVITPGTNTSNQVAVLYQDVNCTEVPVAIHADQLTPTWRVYSTGSNVFQTRAGCLI
GAEHVNNSYECDIPIGAGICASYQTQTNSPRRARSVASQSIIAYTMSLGAENSVAYSNNSIAIPTNF
TISVTTEILPVSMTKTSVDCTMYICGDSTECSNLLLQYGSFCTQLNRALTGIAVEQDKNTQEVFAQ
VKQIYKTPPIKDFGGFNFSQILPDPSKPSKRSFIEDLLFNKVTLADAGFIKQYGDCLGDIAARDLIC
AQKFNGLTVLPPLLTDEMIAQYTSALLAGTITSGWTFGAGAALQIPFAMQMAYRFNGIGVTQNV
LYENQKLIANQFNSAIGKIQDSLSSTASALGKLQDVVNQNAQALNTLVKQLSSNFGAISSVLNDIL
SRLDKVEAEVQIDRLITGRLQSLQTYVTQQLIRAAEIRASANLAATKMSECVLGQSKRVDFCGKG
YHLMSFPQSAPHGVVFLHVTYVPAQEKNFTTAPAICHDGKAHFPREGVFVSNGTHWFVTQRNF
YEPQIITTDNTFVSGNCDVVIGIVNNTVYDPLQPELDSFKEELDKYFKNHTSPDVDLGDISGINAS
VVNIQKEIDRLNEVAKNLNESLIDLQELGKYEQYIKWPWYIWLGFIAGLIAIVMVTIMLCCMTSC
CSCLKGCCSCGSCCKFDEDDSEPVLKGVKLHYT
SEQ ID NO: 16, SARS-CoV-2 Spike, Wuhan-Hu-1, NCBI Ref Seq:
YP_009724390.1) with K986P and V987P stabilizing mutations
(shown in bolded, double-underlined text):
MFVFLVLLPLVSSQCVNLTTRTQLPPAYTNSFTRGVYYPDKVFRSSVLHSTQDLFLPFFSNVTWF
HAIHVSGTNGTKRFDNPVLPFNDGVYFASTEKSNIIRGWIFGTTLDSKTQSLLIVNNATNVVIKVC
EFQFCNDPFLGVYYHKNNKSWMESEFRVYSSANNCTFEYVSQPFLMDLEGKQGNFKNLREFVF
KNIDGYFKIYSKHTPINLVRDLPQGFSALEPLVDLPIGINITRFQTLLALHRSYLTPGDSSSGWTAG
AAAYYVGYLQPRTFLLKYNENGTITDAVDCALDPLSETKCTLKSFTVEKGIYQTSNFRVQPTESI
VRFPNITNLCPFGEVFNATRFASVYAWNRKRISNCVADYSVLYNSASFSTFKCYGVSPTKLNDLC
FTNVYADSFVIRGDEVRQIAPGQTGKIADYNYKLPDDFTGCVIAWNSNNLDSKVGGNYNYLYRL
FRKSNLKPFERDISTEIYQAGSTPCNGVEGENCYFPLQSYGFQPTNGVGYQPYRVVVLSFELLHAP
ATVCGPKKSTNLVKNKCVNFNFNGLTGTGVLTESNKKFLPFQQFGRDIADTTDAVRDPQTLEILD
ITPCSFGGVSVITPGTNTSNQVAVLYQDVNCTEVPVAIHADQLTPTWRVYSTGSNVFQTRAGCLI
GAEHVNNSYECDIPIGAGICASYQTQTNSPRRARSVASQSIIAYTMSLGAENSVAYSNNSIAIPTNF
TISVTTEILPVSMTKTSVDCTMYICGDSTECSNLLLQYGSFCTQLNRALTGIAVEQDKNTQEVFAQ
VKQIYKTPPIKDFGGFNFSQILPDPSKPSKRSFIEDLLFNKVTLADAGFIKQYGDCLGDIAARDLIC
AQKFNGLTVLPPLLTDEMIAQYTSALLAGTITSGWTFGAGAALQIPFAMQMAYRENGIGVTQNV
LYENQKLIANQFNSAIGKIQDSLSSTASALGKLQDVVNQNAQALNTLVKQLSSNFGAISSVLNDIL
SRLDPPEAEVQIDRLITGRLQSLQTYVTQQLIRAAEIRASANLAATKMSECVLGQSKRVDFCGKG
YHLMSFPQSAPHGVVFLHVTYVPAQEKNFTTAPAICHDGKAHFPREGVFVSNGTHWFVTQRNF
YEPQIITTDNTFVSGNCDVVIGIVNNTVYDPLQPELDSFKEELDKYFKNHTSPDVDLGDISGINAS
VVNIQKEIDRLNEVAKNLNESLIDLQELGKYEQYIKWPWYIWLGFIAGLIAIVMVTIMLCCMTSC
CSCLKGCCSCGSCCKFDEDDSEPVLKGVKLHYT
SEQ ID NO: 22, SARS-CoV-2 Spike with K986P and V987P stabilizing
mutations (shown in bolded, double-underlined text):
MFVFLVLLPLVSSQCVNLTTRTQLPPAYTNSFTRGVYYPDKVFRSSVLHSTQDLFLPFFSNVTWF
HAIHVSGTNGTKRFDNPVLPFNDGVYFASTEKSNIIRGWIFGTTLDSKTQSLLIVNNATNVVIKVC
EFQFCNDPFLGVYYHKNNKSWMESEFRVYSSANNCTFEYVSQPFLMDLEGKQGNFKNLREFVF
KNIDGYFKIYSKHTPINLVRDLPQGFSALEPLVDLPIGINITRFQTLLALHRSYLTPGDSSSGWTAG
AAAYYVGYLQPRTFLLKYNENGTITDAVDCALDPLSETKCTLKSFTVEKGIYQTSNFRVQPTESI
VRFPNITNLCPFGEVFNATRFASVYAWNRKRISNCVADYSVLYNSASFSTFKCYGVSPTKLNDLC
FTNVYADSFVIRGDEVRQIAPGQTGKIADYNYKLPDDFTGCVIAWNSNNLDSKVGGNYNYLYRL
FRKSNLKPFERDISTEIYQAGSTPCNGVEGFNCYFPLQSYGFQPTNGVGYQPYRVVVLSFELLHAP
ATVCGPKKSTNLVKNKCVNFNFNGLTGTGVLTESNKKFLPFQQFGRDIADTTDAVRDPQTLEILD
ITPCSFGGVSVITPGTNTSNQVAVLYQDVNCTEVPVAIHADQLTPTWRVYSTGSNVFQTRAGCLI
GAEHVNNSYECDIPIGAGICASYQTQTNSPRAAASVASQSIIAYTMSLGAENSVAYSNNSIAIPTNF
TISVTTEILPVSMTKTSVDCTMYICGDSTECSNLLLQYGSFCTQLNRALTGIAVEQDKNTQEVFAQ
VKQIYKTPPIKDFGGFNFSQILPDPSKPSKRSFIEDLLFNKVTLADAGFIKQYGDCLGDIAARDLIC
AQKFNGLTVLPPLLTDEMIAQYTSALLAGTITSGWTFGAGAALQIPFAMQMAYRENGIGVTQNV
LYENQKLIANQFNSAIGKIQDSLSSTASALGKLQDVVNQNAQALNTLVKQLSSNFGAISSVLNDIL
SRLDPPEAEVQIDRLITGRLQSLQTYVTQQLIRAAEIRASANLAATKMSECVLGQSKRVDFCGKG
YHLMSFPQSAPHGVVFLHVTYVPAQEKNFTTAPAICHDGKAHFPREGVFVSNGTHWFVTQRNF
YEPQIITTDNTFVSGNCDVVIGIVNNTVYDPLQPELDSFKEELDKYFKNHTSPDVDLGDISGINAS
VVNIQKEIDRLNEVAKNLNESLIDLQELGKYEQYIKWPWYIWLGFIAGLIAIVMVTIMLCCMTSC
CSCLKGCCSCGSCC

### RNA Synthesis

[0961] mRNA and saRNA was synthesized using MEGASCRIPT T7 Transcription kit (Invitrogen™, THERMOFISHER SCIENTIFIC) with 1 μg template and co-transcriptional capping using CLEANCAP AU (TRILINK BIOTECHNOLOGIES). For IVT with ARCA, a final concentration of 12 mM ARCA and 4 mM GTP was used. For ARCA experiments were a GTP analog was utilized, the modNTP was substituted completely to a final concentration of 4 mM. The modNTPs in all CLEANCAP AU IVT reactions were prepared according to manufacturer's protocol. IVT for 3 hours at 37° C. was followed by 10 min DNase treatment and 30 min post-transcriptional poly-adenylation using a Poly(A) Tailing Kit (Invitrogen™, THERMOFISHER SCIENTIFIC). saRNA was purified using MEGAclear™ Transcription Clean-up Kit (Invitrogen™ THERMOFISHER SCIENTIFIC) and eluted in DNase/RNase free H₂O prior to storing at −80° C. The A260 of an equimolar, 1 mM mixture of all combinations of modNTPs and NTPs was empirically determined using a NANODROP2000 (THERMOFISHER SCIENTIFIC). The adjusted factor for each modNTP was used to calculate RNA concentration to ensure consistent delivery between modNTPs (see e.g., Table 1).

TABLE 1
Empirical determination of modified nucleotide absorbance conversion factors. Due to sample
evaporation, as determined by significant increase in viscosity, thienocytidine concentration
was hypothesized, without wishing to be bound by theory, to be >100 mM as listed. A
wild-type absorbance factor was applied to thienocytidine A₂₆₀.

| Chemical Name | Base Analog | Mol Weight (g/mol) | Abs (260 nm) | Factor |
|---|---|---|---|---|
| 7-Deazaadenosine | Adenosine | 506.1 | 5.04 | 55.976 |
| N1-Methyladenosine | Adenosine | 521.2 | 15.369 | 39.399 |
| N6-Methyladenosine | Adenosine | 521.2 | 14.777 | 39.727 |
| 6-Chloropurineriboside | Adenosine | 526.6 | 17.481 | 38.430 |
| 2-Amino-6-chloropurineriboside | Adenosine | 541.6 | 11.482 | 42.280 |
| 2-Aminoadenosine | Adenosine | 522.2 | 14.523 | 39.880 |
| Thienocytidine | Cytidine | 539.2 | *358.295 | n.d. |
| 5-Methoxycytidine | Cytidine | 513.2 | 13.912 | 34.580 |
| 5-Hydroxymethylcytidine | Cytidine | 513.1 | 14.618 | 34.140 |
| 5-Formylcytidine | Cytidine | 511.1 | 14.938 | 33.946 |
| 5-Aminoallylcytidine | Cytidine | 538.2 | 15.888 | 33.546 |
| 5-Methylcytidine | Cytidine | 497.1 | 15.01 | 33.847 |
| S-Hydroxycytidine | Cytidine | 499.1 | 14.513 | 36.431 |
| Isoguanosine | Guanosine | 523.1 | 13.135 | 39.916 |
| Thienoguanosine | Guanosine | 539.2 | 11.774 | 41.100 |
| 2-Aminopurine-riboside | Guanosine | 507.2 | 10.584 | 42.112 |
| 8-Oxoguanosine | Guanosine | 539.1 | 13.191 | 39.951 |
| 5-Carboxymethylesteruridine | Uridine | 542.1 | 23.333 | 33.266 |
| Thienouridine | Uridine | 542.2 | 15.559 | 36.017 |
| 5-Methoxyuridine | Uridine | 514.1 | 13.408 | 37.210 |
| 5-Carboxyuridine + A17 | Uridine | 528.1 | 16.619 | 35.437 |
| 2-Thiouridine | Uridine | 500.2 | 14.605 | 36.376 |
| Methyluridine | Uridine | 498.1 | 15.047 | 36.115 |
| N1-Propylpseudouridine | Uridine | 526.2 | 13.523 | 37.186 |
| N1-Methoxymethylpseudouridine | Pseudouridine | 528.2 | 14.041 | 36.847 |
| N1-Ethylpseudouridine | Pseudouridine | 512.2 | 13.988 | 36.810 |
| N1-Methylpseudouridine | Pseudouridine | 498.1 | 14.557 | 36.396 |
| Pseudouridine | Pseudouridine | 484.1 | 14.861 | 36.160 |
| Wild type | — | | 13.865 | 38.288 |

“N.d.” indicates “not determined”.

modNTP saRNA Screening in HEK293T

[0962] HEK293T cells were grown in DMEM+1 mM sodium pyruvate+10% FBS+1% PS, plated at 70,000 cells/cm² in 96-well plates, and allowed to adhere overnight. mCherry saRNA was transfected using MESSENGERMAX according to manufacturer protocols (Invitrogen™, THERMOFISHER SCIENTIFIC). 24 hours later, cells were prepared for flow cytometry analysis of mCherry expression. Cells were washed 1× in PBS, treated with 1×PBS+2 mM ethylenediaminetetraacetic acid (EDTA) for 5 mins, and then resuspended in fluorescence-activated cell sorting (FACS) Buffer (1×PBS+2% bovine serum albumin (BSA)). Data was acquired on the ATTUNE NXT (THERMO FISHER SCIENTIFIC) and analyzed on FLOWJO (version 10.8.1) Fluorescent microscopy of selected modNTPs was performed on a BIOTEK CYTATION 5 microscope prior to preparation for flow cytometry analysis.

### LNP Formulation

[0963] saRNA were encapsulated inside of LNPs with the following composition (mole percent): 50% (8-[(2-hydroxyethyl)[6-oxo-6-(undecyloxy)hexyl]amino]-octanoic acid, 1-octylnonyl ester [SM-102, CAYMAN]), 1.5% (1,2-dimyristoyl-rac-glycero-3-methoxypolyethylene glycol-2000 [DMG-PEG2K, AVANTI]), 10% (1 1,2-dioleoyl-sn-glycero-3-phosphoethanolamine [DOPE, AVANTI]), 38.5% cholesterol (AVANTI). All RNA was loaded at an N:P ratio of 10 (N:P ratio refers to the molar ratio of ionizable lipid nitrogen to oligonucleotide phosphate, and it represents the charge balance between the cationic tertiary amine of the ionizable cationic lipid and the anionic phosphate group in the oligonucleotide backbone). Prior to formulation, aqueous and lipid phases were separately sterile filtered through 0.22 μm filters. Formulation was performed in sterile conditions. After formulation, LNPs were dialyzed against sterile 1×PBS for 24 hours at 4° C. LNP morphology was characterized via dynamic light scattering (DLS) using a NANOBROOK OMNI (BROOKHAVEN INSTRUMENTS). Encapsulation efficiency was determined using the QUANTIFLUOR RNA System (PROMEGA). To transfect primary T cells, mAb-targeted LNPs were formulated via post-insertion of DSPE-PEG2K-maleimide coupled to anti-CD3 (Clone OKT3, BIOXCELL).

### Expression Potentiation Assays

[0964] HEK and C2C12 cells were grown in Dulbecco's Modified Eagle Medium (DMEM)+10% FBS+1% PS and were passaged every three days. 24 hours prior to transfection, the cells were washed with PBS, trypsinized, and plated in fresh DMEM at 50,000 cells/well. LNPs containing mRNA or saRNA encoding luciferase were added dropwise to the cells in triplicate at 10 ng or 100 ng/well. After 24 hours, the luciferase expression was assayed using the BRIGHTGLO system (PROMEGA).

[0965] Jurkat cells were grown in RPMI+10% FBS+1% PS and maintained between 5×10⁵ and 1×10⁶ cells/ml. Prior to transfection, the cells were washed with PBS and plated in fresh RPMI at 250,000 cells/well. LNPs containing saRNA with or without modified nucleosides were added dropwise to cells in triplicate at 25 ng/well or 250 ng/well. After 24 hours, a portion of the cells were harvested for flow analysis. The remainder of the cells were maintained in culture and assayed by flow at additional time points.

[0966] Primary human CD3+ T cells were isolated by negative selection (T Cell Enrichment Cocktail, STEMCELL TECHNOLOGIES) from peripheral blood and were grown in RPMI+10% FBS+1% PS supplemented with 50 U/mL of IL2, 10 ng/mL IL7, 10 ng/mL IL15. To activate the cells, CD3/CD28 DYNABEADS were added to the cells at a 1:1 bead to cell ratio for 24 hours. After activation, the DYNABEADS were removed, and the T cells were rested for 24 hours before transfection. Primary T cells were washed with PBS and plated at 100K/well in RPMI+10% FBS supplemented with 50 U/mL IL2. For transfection, anti-CD3 conjugated LNPs were dosed in triplicate at 500 ng/well.

### PBMC Early Interferon Response

[0967] Human Peripheral Blood Mononuclear Cells (PBMCs) were thawed and rested for 24 hours in RPMI+10% FBS+1% PS. 500,000 cells (1M/ml) were plated in a 24 well plate. 250 ng of saRNA encapsulated in LNPs, formulated as described above, was added dropwise to the PBMCs. After 6 or 24 hours, media was harvested by centrifugation and analyzed for interferon expression by ELISA. (Human IFN-alpha All Subtype QUANTIKINE ELISA-R&D SYSTEMS) (Human IFN-beta Duo Set ELISA R&D SYSTEMS). cDNA was generated using High-Capacity cDNA Reverse Transcription Kit (APPLIED BIOSYSTEMS), according to manufacturer's protocols. Quantitative polymerase chain reaction (qPCR) for specific genes was carried out using TAQMAN probes in TAQMAN advanced master mix (THERMO FISHER SCIENTIFIC). Ubiquitin C labeled with the fluorescent dye VIC™ (UBC-VIC) was multiplexed as the endogenous control for all qPCRs.

### Animal Maintenance

[0968] All animal experiments described in this study were performed in accordance with protocols that were reviewed and approved by an Institutional Animal Care and Use and Committee. All mice were maintained in accredited facilities. Vaccination studies and replication-competent SARS-CoV-2 experiments were performed in a biosafety level 2 (BSL-2) and 3 laboratory (BSL-3).

### Virus Production Cell Culture

[0969] VeroE6 cells were grown in Dulbecco's modified Eagle's medium (DMEM) (THERMOSCIENTIFIC, Waltham, MA, USA) supplemented with 10% (volume/volume percentage, v/v) heat-inactivated fetal bovine serum (FBS) (BIO-TECHNE, R&D SYSTEMS, Minneapolis, MN, USA) and 1% (v/v) penicillin streptomycin (P/S) (THERMOSCIENTIFIC, Waltham, MA, USA). A549-hACE2/hTMPRSS2 cell lines were maintained in DMEM containing 10% FBS and 1% PS supplemented with 2.5 ug/mL Puromycin and Blasticidin. All cell lines were maintained in a cell incubator at 37° C. with 5% CO₂.

### SARS-CoV-2 Isolate Stock

[0970] All replication-competent SARS-CoV-2 experiments were performed in a BSL-3 facility at. The clinical isolate named 2019-nCoV/USA-WA1/2020 strain (NCBI accession number: MN985325) of SARS-CoV-2 was obtained from BEI RESOURCES (Manassas, VA, USA). SARS-CoV-2 MA30 and SARS-CoV-2 Delta variant were provided by other groups. Viral stocks were prepared and titered as described in Kenney et al., 2022, Cell Rep. 39(3): p. 110714, the content of which is incorporated herein by reference in its entirety.

### Mouse Studies

[0971] 8-10 weeks old male and female C57BL/6J mice were obtained from JACKSON LABORATORIES (Bar Harbor, ME, USA, Catalog #000664). In a BSL-2 and BSL-3 facility, mice were group-housed by sex in TECHNIPLAST green line individually ventilated cages (TECHNIPLAST, Buguggiate, Italy). The room was maintained with a 12:12 light cycle at 30-70% humidity.

### Vaccination Studies

[0972] Mice were injected intramuscularly (IM.) in the hind limb with 50 μL of PBS or LNPs containing 10 ng, 100 ng, or 1000 ng of mRNA or saRNA. At 24-hours and 48-hours post vaccination, serum was collected via submandibular bleeding from groups of five mice from the 1000 ng vaccinated groups for analysis of interferon response. At 28 days post vaccination, mice were administrated I.M. with a booster dose of PBS or vaccine (50 uL; similar dosage as primary vaccination). At day 35 post vaccination, mice were transferred into BSL-3 and challenged with MA30 virus.

### SARS-CoV-2 Challenge Experiments

[0973] Vaccinated and boosted mice were intranasally inoculated with 1×10⁵ PFU SARS-CoV-2 MA30 virus resuspended in 50 μL of 1×PBS. Mice were inoculated under 1%-3% isoflurane anesthesia. Infected mice were monitored and clinically scored for changes in weight, respiration, appearance, responsiveness and behavior over the course of 14-days post infection. Mice with a cumulative clinical score of 4 or 25% weight loss were euthanized.

### Serum Preparation

[0974] Blood was collected at the designated time points via submandibular bleeding and serum was isolated by centrifuging blood in a benchtop centrifuge at 3500 revolutions per minute (RPM) for 10 minutes (min) at room temperature. Serum was then collected, transferred into a new EPPENDORF tube and stored at −80° C. for downstream analysis.

### Antigen Production in C2C12 Cells

[0975] C2C12 cells were grown in DMEM+10% FBS+1% PS, plated at 25,000 cells/well in 96-well TC treated plates, and allowed to adhere overnight. LNPs containing mRNA or saRNA encoding for each antigen were added to cells in triplicate at 100 ng/well, except for HA which was dosed at 25 ng/well. After 24 hours cells were harvested for flow analysis using the following mAbs: SARS-CoV-2 Spike Protein (RBD) Human monoclonal (EBIOSCIENCES-Clone: P05Dhu-AF647 conjugated), Influenza A HIN1 (A/California/07/2009) Hemagglutinin, Rabbit polycloncal: (1:1000 dilution) (SINOBIOLOGICAL-Cat: 11085-T62-APC conjugated). Identical treatments were performed for ELISA confirmation. Cells for ELISA were washed twice in PBS and then resuspended in 1×PBS+0.1% TRITON X-100. Cells were freeze-thawed once before being thoroughly pipetted to ensure lysis and membrane disruption. ELISA was performed use antigen specific sandwich ELISA kits according to manufacturer's protocol (SINOBIOLOGICAL).

### Serum Interferon Analysis

[0976] Serum interferon alpha and beta were analyzed by ELISA (LEGEND MAX™ Mouse IFN-β ELISA Kit-BIOLEGEND) (ELISA MAX™ Deluxe Set Mouse IFN-α1-BIOLEGEND).

TABLE 2
Summary of survival study statistics for group comparisons
in FIG. 60 and FIG. 65. Log-rank (Mantel-Cox) test.

| Group 1 | Group 2 | P value |
|---|---|---|
| 10 ng WT saRNA | 10 ng 5 mC saRNA | 0.0497 |
| PBS | 10 ng 5 mC saRNA | 0.0001 |
| PBS | 1000 ng N1mΨ mRNA | <0.0001 |
| PBS | 100 ng WT saRNA | <0.0001 |
| PBS | 100 ng 5 mC saRNA | <0.0001 |
| PBS | 1000 ng WT saRNA | <0.0001 |
| PBS | 1000 ng 5 mC saRNA | <0.0001 |

### Example 21: Improved Yield of Self-Amplifying RNA with Complete Substitution of Cytidine for 5-Hydroxymethylcytdine

[0977] This example demonstrates the unexpected finding that self-amplifying RNA synthesized with complete replacement of cytidine with 5-hydroxymethylcytidine resulted in greater yields than replacement of cytidine with 5-methylcytidine or replacement of uridine with 5-methyluridine or N1-methylspeudouridine. In this example, three different saRNA plasmid DNA templates were prepared containing the coding sequence of NSP1-4 of VEEV, and the SARS-CoV-2 Spike sequence (Construct 1), the RSV fusion protein sequence (Construct 2), or an mCherry fluorescent reporter sequence (Construct 3). The plasmids were cloned in DH5alpha E. coli and purified using a ZymoPURE™ 11 Plasmid Midiprep Kit (ZYMO RESEARCH). The promoter region was a CLEANCAP AU (TRILINK BIOTECHNOLOGIES) compatible T7 promoter (Promoter seq: TAATACGACTCACTATAAT; SEQ ID NO: 1). Plasmids were linearized with MluI-HF for 3 hours at 37° C., and linearized template was purified using QIAQUICK PCR PURIFICATION KIT (QIAGEN). saRNA was synthesized using MEGASCRIPT T7 TRANSCRIPTION KIT (INVITROGEN™, THERMOFISHER SCIENTIFIC) with 1p g template, co-transcriptional capping using CLEANCAP AU (final conc. 4 mM), and a 3 hour incubation (TRILINK BIOTECHNOLOGIES). The final concentration of all NTPs, either modified or unmodified, was 5 mM. IVT was followed by 10 min DNase treatment and 30 min post-transcriptional poly-adenylation using a Poly(A) Tailing Kit (INVITROGEN™, THERMOFISHER SCIENTIFIC). saRNA was purified using MEGACLEAR™ TRANSCRIPTION CLEAN-UP KIT (INVITROGEN™ THERMOFISHER SCIENTIFIC) and eluted in Dnase/Rnase free H₂O prior to storing at −80° C. The A260 of all modNTPs was empirically determined using a NANODROP2000 (THERMOFISHER SCIENTIFIC). The adjusted factor for each modNTP was used to calculate RNA concentration after in vitro synthesis to adjust for discrepancies in quantification from inclusion of the different modifications. The complete substitution of cytidine for 5-methylcytidine resulted in a 34.8% lower RNA yield on average (see e.g., FIG. 68). Unexpectedly, the substitution of cytidine for 5-hydroxymethylcytidine resulted in only a 1.5% lower RNA yield on average. By comparison, complete substitution of uridine for 5-methyluridine resulted in a 16.5% lower RNA yield on average. Complete substitution of uridine for N1-methylspeudouridine resulted in a 27.6% lower RNA yield on average. In conclusion this example demonstrates the unexpected result that the complete substitution of cytidine with 5-hydroxymethylcytidine decreases the overall RNA yield less than by inclusion of other nucleotide modifications.

### Example 22: Improved Transfection of Jurkat Cells Transfected with Self-Amplifying RNA with Complete Substitution of Cytidine for 5-Methylcytidine or 5-Hydroxymethylcytidine

[0978] This example demonstrates the unexpected finding that self-amplifying RNA synthesized with complete replacement of cytidine with 5-hydroxymethylcytidine or 5-methylcytidine resulted in improved lipid nanoparticle (LNP) mediated transfection to Jurkat cells when compared with unmodified self-amplifying RNA. A self-amplifying RNA reporter encoding mCherry was synthesized by in vitro transcription saRNA was synthesized using MEGASCRIPT T7 TRANSCRIPTION KIT (INVITROGEN™, THERMOFISHER SCIENTIFIC) with 1 μg template, co-transcriptional capping using CLEANCAP AU (final conc. 4 mM), and a 3 hour incubation (TRILINK BIOTECHNOLOGIES). The final concentration of all NTPs, either modified or unmodified, was 5 mM. To synthesize wildtype saRNA, all of the nucleotides were unmodified. To synthesize 5-hydroxymethylctydine saRNA, 100% of cytidine was replaced by 5-hydroxymethylcytidine. To synthesize 5-methylcytidine saRNA, 100% of cytidine was replaced by 5-methylcytidine. To synthesize N1-methylpseudouridine, 100% of uridine was replaced by N1-methylpseudouridine. IVT was followed by 10 min Dnase treatment and 30 min post-transcriptional poly-adenylation using a Poly(A) Tailing Kit (INVITROGEN™, THERMOFISHER SCIENTIFIC). saRNA was purified using MEGAclear™ Transcription Clean-up Kit (INVITROGEN™ THERMOFISHER SCIENTIFIC) and eluted in Dnase/Rnase free H₂O prior to storing at −80 degrees. The A260 of all modNTPs was empirically determined using a NANODROP2000 (THERMOFISHER SCIENTIFIC). The adjusted factor for each modNTP was used to ensure accurate loading of lipid nanoparticles (LNPs) with saRNA. Lipid nanoparticles comprised of an ionizable lipid (50 mol %), dioleoylphosphatidylethanolamine (DOPE) (10 mol %), cholesterol (38.5 mol %) and 1,2-dimyristoyl-rac-glycero-3-methoxypolyethylene glycol-2000 (DMG-PEG2K) (1.5 mol %) containing each saRNA construct were synthesized at a N:P ratio (the ratio of positively-chargeable polymer amine (N=nitrogen) groups to negatively-charged nucleic acid phosphate (P) groups) of 10. The resulting lipid nanoparticles were dialyzed in phosphate-buffered saline (PBS) for 24 hours. RNA encapsulation efficiency was determined using a QUANTIFLUOR assay (PROMEGA). Jurkat cells were grown in Roswell Park Memorial Institute (RPMI) RPMI medium+10% fetal bovine serum (FBS)+1% Penicillin/Streptomycin (PS) and maintained between 5×10⁵ and 2×10⁶ cells/ml. Prior to transfection, the cells were washed with PBS and plated in fresh RPMI at 100,000 cells/well. LNPs containing saRNA with or without modified nucleosides were added dropwise to cells in triplicate at 100 ng/well. After 24 hours, the cells were washed and prepared for flow cytometry. Flow cytometry analysis showed a significant enhancement in transfection efficiency for Jurkat cells transfected with 5-hydroxymethylcytidine or 5-methylcytidine substituted RNA, when compared with wildtype saRNA or N1-methylpseudouridine substituted saRNA (see e.g., FIG. 69). In conclusion, this unexpected result demonstrates that saRNA fully substituted with 5-hydroxymethylcytidine or 5-methylcytidine is capable of improved LNP mediated transfection and expression of a cargo protein, in contrast to unmodified saRNA or saRNA modified with other modified nucleotides such as N1-methylpseudouridine.

### Example 23: Improved Protein Expression in Cells Transfected with Low Doses of Self-Amplifying RNA with Complete Substitution of Cytidine for 5-Methylcytidine

[0979] This example demonstrates the unexpected finding that self-amplifying RNA synthesized with complete substitution of cytidine for 5-methylcytidine resulted in improved protein production by low dose LNP transfection. A self-amplifying (saRNA) or non-amplifying (mRNA) reporter constructs encoding firefly luciferase were synthesized by in vitro transcription. Both RNA constructs were synthesized using MEGASCRIPT T7 Transcription kit (INVITROGEN™, THERMOFISHER SCIENTIFIC) with 1p g template, co-transcriptional capping using CLEANCAP AU (final conc. 4 mM), and a 3 hour incubation (TRILINK BIOTECHNOLOGIES). The final concentration of all NTPs, either modified or unmodified, was 5 mM. To synthesize wildtype saRNA, all of the nucleotides were unmodified. To synthesize 5-methylcytidine saRNA, 100% of cytidine was replaced by 5-methylcytidine. To synthesize N1-methylpseudouridine mRNA, 100% of uridine was replaced by N1-methylpseudouridine. IVT was followed by 10 min Dnase treatment and 30 min post-transcriptional poly-adenylation using a Poly(A) Tailing Kit (INVITROGEN™, THERMOFISHER SCIENTIFIC). saRNA was purified using MEGACLEAR™ TRANSCRIPTION CLEAN-UP KIT (INVITROGEN™ THERMOFISHER SCIENTIFIC) and eluted in Dnase/RNase free H₂O prior to storing at −80 degrees. The A260 of all modNTPs was empirically determined using a NANODROP2000 (THERMOFISHER SCIENTIFIC). The adjusted factor for each modNTP was used to ensure accurate loading of lipid nanoparticles with mRNA or saRNA. Lipid nanoparticles comprised of an ionizable lipid (50 mol %), DOPE (10 mol %), cholesterol (38.5 mol %) and DMG-PEG2K (1.5 mol %) containing each saRNA construct were synthesized at a N:P ratio of 10. The resulting lipid nanoparticles were dialyzed in PBS for 24 hours. The RNA encapsulation efficiency was determined using a QUANTIFLUOR assay (PROMEGA). 24 hours before transfection, 25K HEK293-T cells were plated in 200 μL of Dulbecco's Modified Eagle Medium (DMEM) containing 10% FBS and 1% P/S. For each construct, 100 ng, 10 ng, and 1 ng of RNA containing LNPs were added to wells in triplicate. To measure the production of the luciferase reporter protein, BRIGHTGLO reagent was added to the wells 24 hours after transfection. The luciferase signal was read with a spectrophotometer. Analysis of the luminescence signal showed that increased expression of the reporter occurred in cells transfected with 5-methylcytidine containing saRNA by comparison to expression from cells transfected with N1-methylpseudouridine containing mRNA or wildtype (unmodified) saRNA (see e.g., FIG. 70). Unexpectedly, the difference between the treatment groups was more pronounced as the dose of RNA administered was decreased (see e.g., Table 3A-3B). In conclusion this example demonstrates the unexpected result that saRNA modified with 5-methylcytidine shows improved expression over unmodified saRNA or modified mRNA and that the improved expression is more pronounced at lower doses.

TABLE 3A)
Analysis of luciferase reporter expression in HEK cells. Expression
is normalized to the level of expression of the N1-methylpseudouridine
luciferase reporter at each dosage level.

| | N1mU | WT | 5 mC |
|---|---|---|---|
| Dose | mRNA | saRNA | saRNA |
| 1 ng | 1.00 | 2.41 | 4.63 |
| 10 ng | 1.00 | 9.13 | 46.87 |
| 100 ng | 1.00 | 9.98 | 70.55 |
| Average | 1.00 | 7.17 | 40.68 |

TABLE 3B)
Analysis of luciferase reporter expression in HEK cells. Expression
is normalized to the level of expression from the unmodified
saRNA (WT saRNA) luciferase reporter at each dosage level.

| | N1mU | WT | 5 mC |
|---|---|---|---|
| Dose | mRNA | saRNA | saRNA |
| 1 ng | 0.10 | 1.00 | 7.07 |
| 10 ng | 0.11 | 1.00 | 5.13 |
| 100 ng | 0.42 | 1.00 | 1.92 |
| Average | 0.21 | 1.00 | 4.71 |

### Example 24: Improved Expression of Secreted Proteins in Cells Transfected with Self-Amplifying RNA with Complete Substitution of Cytidine by 5-Methylcytidine

[0980] This example demonstrates the unexpected finding that self-amplifying RNA synthesized with complete replacement of cytidine for 5-methylcytidine results in improved production of a secreted protein, interleukin-12 (IL12). IL12 is a heterodimeric protein consisting of two chains, an alpha and beta chain. IL12 can be expressed in its active form as a monomeric protein by insertion of a linker between the two chains with an uninterrupted protein reading frame. A self-amplifying RNA reporter encoding this bioactive form of IL-12 was synthesized by in vitro transcription saRNA was synthesized using MEGASCRIPT T7 TRANSCRIPTION KIT (INVITROGEN™, THERMOFISHER SCIENTIFIC) with 1p g template, co-transcriptional capping using CLEANCAP AU (final conc. 4 mM), and a 3 hour incubation (TRILINK BIOTECHNOLOGIES). The final concentration of all NTPs, either modified or unmodified, was 5 mM. To synthesize wildtype saRNA, all of the nucleotides were unmodified. To synthesize 5-methylcytidine saRNA, 100% of cytidine was replaced by 5-methylcytidine. As a control, saRNA encoding mCherry was synthesized with complete substitution of cytidine for 5-methylcytidine. IVT was followed by 10 min DNase treatment and 30 min post-transcriptional poly-adenylation using a Poly(A) Tailing Kit (INVITROGEN™, THERMOFISHER SCIENTIFIC). saRNA was purified using MEGACLEAR™ TRANSCRIPTION CLEAN-UP KIT (INVITROGEN™ THERMOFISHER SCIENTIFIC) and eluted in DNase/RNase free H₂O prior to storing at −80 degrees. The A260 of all modNTPs was empirically determined using a NANODROP2000 (THERMOFISHER SCIENTIFIC). The adjusted factor for each modNTP was used to ensure accurate loading of lipid nanoparticles with saRNA. Lipid nanoparticles comprised of an ionizable lipid (50 mol %), DOPE (10 mol %), cholesterol (38.5 mol %) and DMG-PEG2K (1.5 mol %) containing each saRNA construct were synthesized at a N:P ratio of 10. The resulting lipid nanoparticles were dialyzed in PBS for 24 hours. RNA encapsulation efficiency was determined using a QUANTIFLUOR assay (PROMEGA). 24 hours before transfection, 25K HEK293-T cells were plated in 200 μL of DMEM containing 10% FBS and 1% P/S. For each construct, an 8-point 3-fold serial dilution of the RNA containing LNPs was performed to dose cells at doses in the range of 250 ng to 0.11 ng. RNA containing LNPs were added to wells in triplicate. After 24 hours, supernatant from the transfected cells was harvested and analyzed by ELISA specific to IL-12 p70 (R&D SYSTEMS). Unexpectedly, the cells transfected with the 5-methylcytidine modified saRNA encoding IL12 resulted in greater IL12 secretion into the media than cells transfected by wildtype (unmodified saRNA) (see e.g., FIG. 71). The concentration necessary to achieve 50% of the maximum observed concentration of IL12 (EC50) for wildtype saRNA was 30.3 ng. Unexpectedly, the EC50 was decreased approximately 3-fold for the 5-methylcytidine modified saRNA to 10.9 ng.

[0981] In a therapeutic context, a cancer patient is injected intratumorally with 5mC modified saRNA encoding IL12 that is contained in a pharmaceutically acceptable delivery carrier. The administered dose is significantly less than the dose required for equivalent bioactivity from wildtype unmodified saRNA. The expression of IL12 occurs at bioactive levels for sufficient duration to recruit immune cells and result in tumor clearance. In conclusion, this example demonstrates the unexpected result that 5-methylcytidine substituted RNA resulted in improved expression of a secreted protein.

### Example 25: Highly Substituted Self-Amplifying RNA for Expression of an Antibody or Antibody Fragment

[0982] This example details the use of self-amplifying RNA (saRNA) with 100% substitution of cytidine for 5-methylcytidine or 5-hydroxymethylcytidine as a method to elicit a protective or therapeutic response against pathogens, cancer, or other biological agents that inflict disease. Self-amplifying RNA containing 5-hydroxymethylctydine or 5-methylcytidine is synthesized by in vitro transcription. The self-amplifying RNA encodes a monoclonal antibody, an antibody fragment, or multiple antibody fragments from different antibody clones. Distinct antibody fragments are linked together to form a hybrid molecule that can engage unique targets. The antibody or antibody fragments have specificity to a particular protein, nucleic acid, peptide, receptor, or other biological material. The expression of the antibody or antibody fragment from modified self-amplifying RNA transfected cells or tissue results in prophylactic neutralization of pathogens, clearing of cancer, or clearing of other biological agents that inflict disease. Alternatively, the expression of the antibody or antibody fragment results in stimulation or inhibition of a biological pathway that reduces disease burden. For prophylactic treatment against pathogens, a patient receiving an injection of 5-methylcytidine or 5-hydroxymethylcytidine modified saRNA encoding an antibody or antibody fragment results in neutralization of the suspected pathogen to prevent infectious disease. For clearing of cancer, the antibody or antibody fragment binds an extracellular receptor or protein with activity that drives proliferation. A hybrid molecule binds T cells and a marker on diseased cells or cells that inflict disease, resulting in targeted cytotoxicity of T cells against the diseased cells. The administration of the modified saRNA occurs intravenously, intradermally, subcutaneously, or preferably intramuscularly by delivery with a pharmaceutically acceptable delivery carrier. The expression of the antibody or antibody fragment occurs for longer and at higher levels when compared to an equivalent dose by modified messenger RNA or unmodified self-amplifying RNA.

### Example 26: Potent Secretion of a Bispecific T Cell Engager from Cells Transfected with Self-Amplifying RNA with Complete Substitution of Cytidine for 5-Methylcytidine

[0983] This example demonstrates an unexpected result, when cells are transfected with self-amplifying RNA encoding a bispecific T cell engager, in which 5-methylcytidine replaces cytidine, production of a functional protein occurs at levels equal to or greater than the levels from unmodified self-amplifying RNA. A plasmid template containing the sequence of a self-amplifying RNA encoding a bispecific T cell engager (BiTE) targeting HER2 was generated by cloning. As a control, a self-amplifying RNA encoding a HER2 scFv was generated. Both RNA constructs were synthesized using MEGASCRIPT T7 TRANSCRIPTION KIT (INVITROGEN™, THERMOFISHER SCIENTIFIC) with 1 μg template, co-transcriptional capping using CLEANCAP AU (final conc. 4 mM), and a 3-hour incubation (TRILINK BIOTECHNOLOGIES). The final concentration of all NTPs, either modified or unmodified, was 5 mM. To synthesize wildtype saRNA, all of the nucleotides were unmodified. To synthesize 5-methylcytidine saRNA, 100% of cytidine was replaced by 5-methylcytidine. IVT was followed by 10 min DNase treatment and 30 min post-transcriptional poly-adenylation using a Poly(A) Tailing Kit (INVITROGEN™, THERMOFISHER SCIENTIFIC). saRNA was purified using MEGACLEAR™ TRANSCRIPTION CLEAN-UP KIT (INVITROGEN™ THERMOFISHER SCIENTIFIC) and eluted in DNase/RNase free H₂O prior to storing at −80 degrees. The A260 of all modNTPs was empirically determined using a NANODROP2000 (THERMOFISHER SCIENTIFIC). The adjusted factor for each modNTP was used to ensure accurate loading of lipid nanoparticles with mRNA or saRNA. Lipid nanoparticles comprised of an ionizable lipid (50 mol %), DOPE (10 mol %), cholesterol (38.5 mol %) and DMG-PEG2K (1.5 mol %) containing each saRNA construct were synthesized at a N:P ratio of 10. The resulting lipid nanoparticles were dialyzed in PBS for 24 hours. The RNA encapsulation efficiency was determined using a QUANTIFLUOR assay (PROMEGA). 24 hours before transfection, 25K C2C12 cells were plated in 200 μL of DMEM containing 10% FBS and 1% P/S. For each construct, an 8-point 3-fold serial dilution of the RNA containing LNPs was performed to dose cells at doses in the range of 250 ng to 0.11 ng. After 24 hours, supernatant was harvested from the cells. Primary human CD3+ T cells were isolated by negative selection from peripheral blood derived from two distinct donors and were grown in RPMI+10% FBS+1% PS supplemented with 50 U/mL of IL2, 10 ng/mL IL7, 10 ng/mL IL15. To activate the cells, CD3/CD28 Dynabeads were added to the cells at a 1:1 bead to cell ratio for 24 hours. After activation, the Dynabeads were removed, and the T cells were allowed to recover for 24 hours before transfection. Nalm6 cells do not express HER2 naturally. HER2-positive Nalm6 cells were generated by lentiviral transduction with a vector encoding the extracellular domain from the HER2 receptor. Primary T cells (75K/well) were washed with PBS and plated with HER2-negative or HER2-positive Nalm6 cells (25K/well) containing a luciferase reporter at 3:1 effector to target ratio in RPMI+10% FBS+1% PS. The supernatant from the transfected C2C12 were added to the co-culture at 1:10 dilution. After 24 hours, the luciferase signal from the target cells was measured by addition of BRIGHTGLO reagent (PROMEGA) and the signal was read from a spectrophotometer. The percentage of target cell lysis was calculated with the following formula: [(Target cell only signal)−(Target cell+T cell signal)]+(Target cell signal)*100%. Unexpectedly, introduction of supernatant from C2C12 cells transfected with HER2 specific BiTE saRNA modified with 5mC led to target cell lysis in both donors, reaching levels equivalent to or surpassing those achieved with supernatant from cells transfected with HER2 specific BiTE unmodified saRNA (see e.g., FIG. 72 and FIG. 73). The observed target cell lysis was dependent on HER2 expression, since HER2 negative Nalm6 cells were not lysed by the addition of the supernatant containing the secreted bispecific T cell engager (see e.g., FIG. 74). In conclusion, this example demonstrates the unexpected result that 5-methylcytidine substituted RNA resulted in potent expression of a bispecific T cell engager at levels equal to or greater than the levels from unmodified RNA.

### Example 27: Improved Expression of a Bispecific T Cell Engager from Self-Amplifying RNA with Complete Substitution of 5-Hydroxymethylcytidine or 5-Methylcytidine

[0984] This example demonstrates the unexpected finding that self-amplifying RNA encoding a bispecific T cell engager, with complete replacement of cytidine with 5-hydroxymethylcytidine or 5-methylcytidine, exhibits higher expression levels compared to unmodified self-amplifying RNA or mRNA modified with N1-methylspeudouridine. Plasmid templates containing the sequence of a self-amplifying RNA and a non-replicating mRNA encoding a bispecific T cell engager (BiTE) targeting HER2 and human CD3 and an mCherry reporter separated by a P2A sequence were generated by cloning. RNA was synthesized by in vitro transcription using the MEGASCRIPT T7 Transcription kit (INVITROGEN™, THERMOFISHER SCIENTIFIC) with 1 μg template, co-transcriptional capping using CLEANCAP AU (final conc. 4 mM), and a 3 hour incubation (TRILINK BIOTECHNOLOGIES). The final concentration of all NTPs, either modified or unmodified, was 5 mM. To synthesize wildtype saRNA (WT saRNA), all of the nucleotides were unmodified. To synthesize 5-hydroxymethylctydine saRNA (5OHmC saRNA), 100% of cytidine was replaced by 5-hydroxymethylcytidine. To synthesize 5-methylcytidine saRNA, 100% of cytidine was replaced by 5-methylcytidine (5mC saRNA). To synthesize N1-methylpseudouridine, 100% of uridine was replaced by N1-methylpseudouridine (N1mψU mRNA). IVT was followed by a 10 min DNase treatment and 30 min post-transcriptional poly-adenylation using a Poly(A) Tailing Kit (INVITROGEN™, THERMOFISHER SCIENTIFIC). The resulting RNA was purified using MEGACLEAR™ Transcription Clean-up Kit (INVITROGEN™ THERMOFISHER SCIENTIFIC) and eluted in DNase/RNase free H₂O prior to storing at −80 degrees. The A260 of all modNTPs was empirically determined using a NANODROP2000 (THERMOFISHER SCIENTIFIC). The adjusted factor for each modNTP was used to ensure accurate loading of lipid nanoparticles with saRNA. Lipid nanoparticles comprised of an ionizable lipid (50 mol %), DOPE (10 mol %), cholesterol (38.5 mol %) and DMG-PEG2K (1.5 mol %) containing each RNA construct were synthesized at a N:P ratio of 10. The resulting lipid nanoparticles were dialyzed in PBS for 24 hours. RNA encapsulation efficiency was determined using a QUANTIFLUOR assay (PROMEGA). 24 hours before transfection, 40K C2C12 cells were plated in a 48 well containing 400 μL of DMEM prepared with 10% FBS and 1% P/S. Each RNA construct was transfected at a dose of 200 ng with 4 biological replicates. After 24 hours the expression of the bispecific T cell engager was determined by measurement of the mCherry reporter via flow cytometry. Viable cells were identified by staining with DAPI. In all conditions, the viability of the cells was >90%. Unexpectedly, flow cytometry analysis showed a significant enhancement in transfection efficiency for C2C12 cells transfected with 5-hydroxymethylcytidine or 5-methylcytidine substituted saRNA, when compared with wildtype saRNA or N1-methylpseudouridine substituted saRNA (see e.g., FIG. 75). The proportion of transfected viable cells was significantly enhanced for the saRNA containing complete substitution of 5-hydroxymethylcytidine or 5-methylcytidine when compared to the unmodified saRNA (see e.g., FIG. 76). The expression level was determined by measurement of the median fluorescence intensity of the mCherry reporter for the viable cell population. Unexpectedly, the expression levels were significantly greater for the 5-hydroxymethylcytidine or 5-methylcytidine modified saRNA when compared with the unmodified saRNA or N1-methylpseudouridine modified mRNA (see e.g., FIG. 77).

[0985] To assess the bioactivity of the secreted bispecific T cell engager, a T cell activation experiment was conducted. In a 96-well plate, Jurkat T cells (125,000 cells per well) containing an NFAT GFP reporter were co-cultured with Nalm6 cells (25,000 cells per well) genetically modified to overexpress HER2. The co-culture was maintained in a medium consisting of 200 μL RPMI with 10% FBS and 1% P/S. To this co-culture, 5 μL of supernatant collected 24 hours post-transfection of the C2C12 cells with the different RNA constructs encoding the HER2-CD3 BiTE and an mCherry reporter was introduced. After 24 hours of culture, the activation status of the Jurkat T cells was determined by measuring GFP expression by single-cell flow cytometry with an ATTUNE NXT instrument. The expression level of GFP was determined by measurement of the median fluorescence intensity of the GFP reporter for the viable Jurkat cell population. Unexpectedly, the conditions treated with supernatant from C2C12 cells transfected with saRNA fully substituted with 5-hydroxymethylcytidine or 5-methylcytidine exhibited the greatest GFP expression, indicating significant T cell activation that was greater than the activation resulting from treatment with supernatant of C2C12 cells transfected with unmodified saRNA or N1-methylpseudouridine modified mRNA (see e.g., FIG. 78). In conclusion, this unexpected result demonstrates that saRNA fully substituted with 5-hydroxymethylcytidine or 5-methylcytidine is capable of improved LNP mediated transfection and expression of a bispecific T cell engager, in contrast to unmodified saRNA or mRNA modified with N1-methylpseudouridine.

### Example 28: Durable Expression from Self-Amplifying RNA with Complete Substitution of Cytidine for 5-Methylcytidine after Intramuscular Injection

[0986] This example demonstrates the unexpected result that 5mC modified self-amplifying RNA results in robust and durable expression after intramuscular injection in vivo. A plasmid template containing the sequence of a self-amplifying RNA encoding firefly luciferase was generated by cloning. A plasmid template containing the sequence of a non-replicating RNA encoding firefly luciferase was utilized as a control. Both RNA constructs were synthesized using MEGASCRIPT T7 Transcription kit (INVITROGEN™, THERMOFISHER SCIENTIFIC) with 1 μg template, co-transcriptional capping using CLEANCAP AU (final conc. 4 mM), and a 3-hour incubation (TRILINK BIOTECHNOLOGIES). The final concentration of all NTPs, either modified or unmodified, was 5 mM. To synthesize 5-methylcytidine saRNA (5mC saRNA), 100% of cytidine was replaced by 5-methylcytidine. To synthesize N1-methylpseudouridine non-replicating mRNA (N1mψU mRNA), 100% of uridine was replaced by N1-methylspeudouridine. IVT was followed by 10 min DNase treatment and 30 min post-transcriptional poly-adenylation using a Poly(A) Tailing Kit (INVITROGEN™, THERMOFISHER SCIENTIFIC). saRNA was purified using MEGACLEAR™ Transcription Clean-up Kit (INVITROGEN™ THERMOFISHER SCIENTIFIC) and eluted in DNase/RNase free H₂O prior to storing at −80 degrees. The A260 of all modNTPs was empirically determined using a NANODROP2000 (THERMOFISHER SCIENTIFIC). The adjusted factor for each modNTP was used to ensure accurate loading of lipid nanoparticles with mRNA or saRNA. Lipid nanoparticles comprised of an ionizable lipid (50 mol %), DOPE (10 mol %), cholesterol (38.5 mol %) and DMG-PEG2K (1.5 mol %) containing each RNA construct were synthesized at a N:P ratio of 10. The resulting lipid nanoparticles were dialyzed in PBS for 24 hours. The LNP synthesis process was conducted under sterile conditions. The RNA encapsulation efficiency was determined using a QUANTIFLUOR assay (PROMEGA). 6-week-old female C57BL/6 mice (n=5/group) were intramuscularly administered LNPs containing 2.5 μg of 5mC saRNA or N1mU mRNA encoding firefly luciferase in 50 μL of PBS. After 24 hours, 200 μL of D-luciferin (15 mg/mL) was administered by intraperitoneal injection. The mice were anesthetized with 2% isoflurane. The resulting bioluminescent signal was measured with an IVIS SPECTRUM instrument at 10 minutes post luciferin injection. This procedure was repeated at 3 days, 7 days, 10 days, 14 days, 21 days, 28 days post LNP administration. The mRNA group exhibited a greater total flux at 24 hours (see e.g., FIG. 79). Unexpectedly, the group administered saRNA modified with 100% 5-methylcytidine substitution showed a consistent increase in signal, reaching peak expression 7 days after the initial injection, which was four times greater than the peak expression of the mRNA group (see e.g., FIG. 80). The 5mC modified saRNA group displayed significantly prolonged expression, maintaining an average signal above the background observed in the PBS treated group throughout the entire 28-day study duration (see e.g., FIG. 80). In conclusion, this example demonstrates the unexpected result that 5-methylcytidine substituted RNA results in robust and durable protein expression after intramuscular injection in vivo.

### Example 29: Exemplary Sequences

[0987] FIGS. 81-91 contain schematics of exemplary vectors and templates used for in vitro transcription of the RNA constructs from the described examples. Additionally, this example includes: DNA sequences of the generic backbone (VEEV saRNA template; see e.g., SEQ ID NO: 2), amino acid sequences of the VEEV replicase (nsp1-4) (see e.g., SEQ ID NO: 4, SEQ ID NO: 23), DNA sequence of an exemplary mCherry encoding saRNA (Exemplary mCherry saRNA template; see e.g., SEQ ID NO: 5), RNA sequence of an exemplary mCherry saRNA with cytidine substitution (see e.g., SEQ ID NO: 6), RNA sequence of an exemplary mCherry saRNA with uridine substitution (see e.g., SEQ ID NO: 7), exemplary SARS-CoV-2 saRNA vaccine sequence (see e.g., SEQ ID NO: 21), and exemplary SARS-CoV-2 spike protein (see e.g., SEQ ID NO: 22).

VEEV saRNA Template, Sequence Type: DNA; T7 promoter double-
underlined (beginning of sequence; taatacgactcactata, SEQ ID NO: 3),
AflII cut site dotted-underlined (cttaag), NdeI cut site bolded (catatg).
Cargo is inserted into the backbone at the AflII and NdeI sites.
SEQ ID NO: 2
taatacgactcactataatgggcggcgcatgagagaagcccagaccaattacctacccaaaatggagaaagttcacgttgacatcgaggaagacagcc
cattcctcagagctttgcagcggagcttcccgcagtttgaggtagaagccaagcaggtcactgataatgaccatgctaatgccagagcgttttcgcatctg
gcttcaaaactgatcgaaacggaggtggacccatccgacacgatccttgacattggaagtgcgcccgcccgcagaatgtattctaagcacaagtatcatt
gtatctgtccgatgagatgtgcggaagatccggacagattgtataagtatgcaactaagctgaagaaaaactgtaaggaaataactgataaggaattggac
aagaaaatgaaggagctggccgccgtcatgagcgaccctgacctggaaactgagactatgtgcctccacgacgacgagtcgtgtcgctacgaagggc
aagtcgctgtttaccaggatgtatacgcggttgacggaccgacaagtctctatcaccaagccaataagggagttagagtcgcctactggataggctttgac
accaccccttttatgtttaagaacttggctggagcatatccatcatactctaccaactgggccgacgaaaccgtgttaacggctcgtaacataggcctatgca
gctctgacgttatggagcggtcacgtagagggatgtccattcttagaaagaagtatttgaaaccatccaacaatgttctattctctgttggctcgaccatct
accacgagaagagggacttactgaggagctggcacctgccgtctgtatttcacttacgtggcaagcaaaattacacatgtcggtgtgagactatagttagtt
gcgacgggtacgtcgttaaaagaatagctatcagtccaggcctgtatgggaagccttcaggctatgctgctacgatgcaccgcgagggattcttgtgctgca
aagtgacagacacattgaacggggagagggtctcttttcccgtgtgcacgtatgtgccagctacattgtgtgaccaaatgactggcatactggcaacagatg
tcagtgcggacgacgcgcaaaaactgctggttgggctcaaccagcgtatagtcgtcaacggtcgcacccagagaaacaccaataccatgaaaaattac
cttttgcccgtagtggcccaggcatttgctaggtgggcaaaggaatataaggaagatcaagaagatgaaaggccactaggactacgagatagacagtta
gtcatggggtgttgttgggcttttagaaggcacaagataacatctatttataagcgcccggatacccaaaccatcatcaaagtgaacagcgatttccactcat
tcgtgctgcccaggataggcagtaacacattggagatcgggctgagaacaagaatcaggaaaatgttagaggagcacaaggagccgtcacctctcatta
ccgccgaggacgtacaagaagctaagtgcgcagccgatgaggctaaggaggtgcgtgaagccgaggagttgcgcgcagctctaccacctttggcag
ctgatgttgaggagcccactctggaggcagacgtcgacttgatgttacaagaggctggggccggctcagtggagacacctcgtggcttgataaaggtta
ccagctacgatggcgaggacaagatcggctcttacgctgtgctttctccgcaggctgtactcaagagtgaaaaattatcttgcatccaccctctcgctgaac
aagtcatagtgataacacactctggccgaaaagggcgttatgccgtggaaccataccatggtaaagtagtggtgccagagggacatgcaatacccgtcc
aggactttcaagctctgagtgaaagtgccaccattgtgtacaacgaacgtgagttcgtaaacaggtacctgcaccatattgccacacatggaggagcgct
gaacactgatgaagaatattacaaaactgtcaagcccagcgagcacgacggcgaatacctgtacgacatcgacaggaaacagtgcgtcaagaaagaa
ctagtcactgggctagggctcacaggcgagctggtggatcctcccttccatgaattcgcctacgagagtctgagaacacgaccagccgctccttaccaag
taccaaccataggggtgtatggcgtgccaggatcaggcaagtctggcatcattaaaagcgcagtcaccaaaaaagatctagtggtgagcgccaagaaa
gaaaactgtgcagaaattataagggacgtcaagaaaatgaaagggctggacgtcaatgccagaactgtggactcagtgctcttgaatggatgcaaacac
cccgtagagaccctgtatattgacgaagcttttgcttgtcatgcaggtactctcagagcgctcatagccattataagacctaaaaaggcagtgctctgcggg
gatcccaaacagtgcggtttttttaacatgatgtgcctgaaagtgcattttaaccacgagatttgcacacaagtcttccacaaaagcatctctcgccgttgc
actaaatctgtgacttcggtcgtctcaaccttgttttacgacaaaaaaatgagaacgacgaatccgaaagagactaagattgtgattgacactaccggcagt
accaaacctaagcaggacgatctcattctcacttgtttcagagggtgggtgaagcagttgcaaatagattacaaaggcaacgaaataatgacggcagctgcc
tctcaagggctgacccgtaaaggtgtgtatgccgttcggtacaaggtgaatgaaaatcctctgtacgcacccacctcagaacatgtgaacgtcctactgac
ccgcacggaggaccgcatcgtgtggaaaacactagccggcgacccatggataaaaacactgactgccaagtaccctgggaatttcactgccacgatag
aggagtggcaagcagagcatgatgccatcatgaggcacatcttggagagaccggaccctaccgacgtcttccagaataaggcaaacgtgtgttgggcc
aaggctttagtgccggtgctgaagaccgctggcatagacatgaccactgaacaatggaacactgtggattattttgaaacggacaaagctcactcagcag
agatagtattgaaccaactatgcgtgaggttctttggactcgatctggactccggtctattttctgcacccactgttccgttatccattaggaataatcact
gggataactccccgtcgcctaacatgtacgggctgaataaagaagtggtccgtcagctctctcgcaggtacccacaactgcctcgggcagttgccactggaa
gagtctatgacatgaacactggtacactgcgcaattatgatccgcgcataaacctagtacctgtaaacagaagactgcctcatgctttagtcctccaccata
atgaacacccacagagtgacttttcttcattcgtcagcaaattgaagggcagaactgtcctggtggtcggggaaaagttgtccgtcccaggcaaaatggttg
actggttgtcagaccggcctgaggctaccttcagagctcggctggatttaggcatcccaggtgatgtgcccaaatatgacataatatttgttaatgtgagga
ccccatataaataccatcactatcagcagtgtgaagaccatgccattaagcttagcatgttgaccaagaaagcttgtctgcatctgaatcccggcggaacct
gtgtcagcataggttatggttacgctgacagggccagcgaaagcatcattggtgctatagcgcggcagttcaagttttcccgggtatgcaaaccgaaatcct
cacttgaagagacggaagttctgtttgtattcattgggtacgatcgcaaggcccgtacgcacaattcttacaagctttcatcaaccttgaccaacatttata
caggttccagactccacgaagccggatgtgcaccctcatatcatgtggtgcgaggggatattgccacggccaccgaaggagtgattataaatgctgctaaca
gcaaaggacaacctggcggaggggtgtgcggagcgctgtataagaaattcccggaaagcttcgatttacagccgatcgaagtaggaaaagcgcgact
ggtcaaaggtgcagctaaacatatcattcatgccgtaggaccaaacttcaacaaagtttcggaggttgaaggtgacaaacagttggcagaggcttatgagt
ccatcgctaagattgtcaacgataacaattacaagtcagtagcgattccactgttgtccaccggcatcttttccgggaacaaagatcgactaacccaatcat
tgaaccatttgctgacagctttagacaccactgatgcagatgtagccatatactgcagggacaagaaatgggaaatgactctcaaggaagcagtggctag
gagagaagcagtggaggagatatgcatatccgacgactcttcagtgacagaacctgatgcagagctggtgagggtgcatccgaagagttctttggctgg
aaggaagggctacagcacaagcgatggcaaaactttctcatatttggaagggaccaagtttcaccaggcggccaaggatatagcagaaattaatgccat
gtggcccgttgcaacggaggccaatgagcaggtatgcatgtatatcctcggagaaagcatgagcagtattaggtcgaaatgccccgtcgaagagtcgg
aagcctccacaccacctagcacgctgccttgcttgtgcatccatgccatgactccagaaagagtacagegcctaaaagcctcacgtccagaacaaattac
tgtgtgctcatcctttccattgccgaagtatagaatcactggtgtgcagaagatccaatgctcccagcctatattgttctcaccgaaagtgcctgcgtatat
tcatccaaggaagtatctcgtggaaacaccaccggtagacgagactccggagccatcggcagagaaccaatccacagaggggacacctgaacaaccacc
acttataaccgaggatgagaccaggactagaacgcctgagccgatcatcatcgaagaggaagaagaggatagcataagtttgctgtcagatggcccga
cccaccaggtgctgcaagtcgaggcagacattcacgggccgccctctgtatctagctcatcctggtccattcctcatgcatccgactttgatgtggacagtt
tatccatacttgacaccctggagggagctagcgtgaccagcggggcaacgtcagccgagactaactcttacttcgcaaagagtatggagtttctggcgcg
accggtgcctgcgcctcgaacagtattcaggaaccctccacatcccgctccgcgcacaagaacaccgtcacttgcacccagcagggcctgctcgagaa
ccagcctagtttccaccccgccaggcgtgaatagggtgatcactagagaggagctcgaggcgcttaccccgtcacgcactcctagcaggtcggtctcga
gaaccagcctggtctccaacccgccaggcgtaaatagggtgattacaagagaggagtttgaggcgttcgtagcacaacaacaatgacggtttgatgcgg
gtgcatacatcttttcctccgacaccggtcaagggcatttacaacaaaaatcagtaaggcaaacggtgctatccgaagtggtgttggagaggaccgaattg
gagatttcgtatgccccgcgcctcgaccaagaaaaagaagaattactacgcaagaaattacagttaaatcccacacctgctaacagaagcagataccagt
ccaggaaggtggagaacatgaaagccataacagctagacgtattctgcaaggcctagggcattatttgaaggcagaaggaaaagtggagtgctaccgaaccc
tgcatcctgttcctttgtattcatctagtgtgaaccgtgccttttcaagccccaaggtcgcagtggaagcctgtaacgccatgttgaaagagaactttccga
ctgtggcttcttactgtattattccagagtacgatgcctatttggacatggttgacggagcttcatgctgcttagacactgccagtttttgccctgcaaagc
tgcgcagctttccaaagaaacactcctatttggaacccacaatacgatcggcagtgccttcagcgatccagaacacgctccagaacgtcctggcagctgcca
caaaaagaaattgcaatgtcacgcaaatgagagaattgcccgtattggattcggcggcctttaatgtggaatgcttcaagaaatatgcgtgtaataatgaat
attgggaaacgtttaaagaaaaccccatcaggcttactgaagaaaacgtggtaaattacattaccaaattaaaaggaccaaaagctgctgctctttttgcg
aagacacataatttgaatatgttgcaggacataccaatggacaggtttgtaatggacttaaagagagacgtgaaagtgactccaggaacaaaacatactga
agaacggcccaaggtacaggtgatccaggctgccgatccgctagcaacagcgtatctgtgcggaatccaccgagagctggttaggagattaaatgcggtcct
gcttccgaacattcatacactgtttgatatgtcggctgaagactttgacgctattatagccgagcacttccagcctggggattgtgttctggaaactgacat
cgcgtcgtttgataaaagtgaggacgacgccatggctctgaccgcgttaatgattctggaagacttaggtgtggacgcagagctgttgacgctgattgaggc
ggctttcggcgaaatttcatcaatacatttgcccactaaaactaaatttaaattcggagccatgatgaaatctggaatgttcctcacactgtttgtgaacac
agtcattaacattgtaatcgcaagcagagtgttgagagaacggctaaccggatcaccatgtgcagcattcattggagatgacaatatcgtgaaaggagtca
aatcggacaaattaatggcagacaggtgcgccacctggttgaatatggaagtcaagattatagatgctgtggtgggcgagaaagcgccttatttctgtgga
gggtttattttgtgtgactccgtgaccggcacagcgtgccgtgtggcagaccccctaaaaaggctgtttaagcttggcaaacctctggcagcagacgatga
acatgatgatgacaggagaagggcattgcatgaagagtcaacacgctggaaccgagtgggtattctttcagagctgtgcaaggcagtagaatcaaggtatg
aaaccgtaggaacttccatcatagttatggccatgactactctagctagcagtgttaaatcattcagctacctgagaggggcccctataactctctacggc

[chemical structure]

TGgaattggcaagctgcttacatagaactcgcggcgattggcatgccgccttaaaatttttattttattttttcttttcttttccgaatcggattttgttt
ttaatatttcaaaaaaaaaaaaaaaaaaaaaaaaaa
first portion of VEEV Replicase (nsp1-4) Protein Sequence; Sequence Type:
Amino Acid; Star indicates stop codon; can be encoded by nucleotides 62-5701 of SEQ ID NO: 2 (or a
codon-optimized version of nucleotides 62-5701 of SEQ ID NO: 2)
SEQ ID NO: 4
MEKVHVDIEEDSPFLRALQRSFPQFEVEAKQVTDNDHANARAFSHLASKLIETEVDPSDTILDIGS
APARRMYSKHKYHCICPMRCAEDPDRLYKYATKLKKNCKEITDKELDKKMKELAAVMSDPDL
ETETMCLHDDESCRYEGQVAVYQDVYAVDGPTSLYHQANKGVRVAYWIGFDTTPFMFKNLAG
AYPSYSTNWADETVLTARNIGLCSSDVMERSRRGMSILRKKYLKPSNNVLFSVGSTIYHEKRDLL
RSWHLPSVFHLRGKQNYTCRCETIVSCDGYVVKRIAISPGLYGKPSGYAATMHREGFLCCKVTD
TLNGERVSFPVCTYVPATLCDQMTGILATDVSADDAQKLLVGLNQRIVVNGRTQRNTNTMKNY
LLPVVAQAFARWAKEYKEDQEDERPLGLRDRQLVMGCCWAFRRHKITSIYKRPDTQTIIKVNSD
FHSFVLPRIGSNTLEIGLRTRIRKMLEEHKEPSPLITAEDVQEAKCAADEAKEVREAEELRAALPPL
AADVEEPTLEADVDLMLQEAGAGSVETPRGLIKVTSYDGEDKIGSYAVLSPQAVLKSEKLSCIHP
LAEQVIVITHSGRKGRYAVEPYHGKVVVPEGHAIPVQDFQALSESATIVYNEREFVNRYLHHIAT
HGGALNTDEEYYKTVKPSEHDGEYLYDIDRKQCVKKELVTGLGLTGELVDPPFHEFAYESLRTR
PAAPYQVPTIGVYGVPGSGKSGIIKSAVTKKDLVVSAKKENCAEIIRDVKKMKGLDVNARTVDS
VLLNGCKHPVETLYIDEAFACHAGTLRALIAIIRPKKAVLCGDPKQCGFFNMMCLKVHFNHEICT
QVFHKSISRRCTKSVTSVVSTLFYDKKMRTTNPKETKIVIDTTGSTKPKQDDLILTCFRGWVKQL
QIDYKGNEIMTAAASQGLTRKGVYAVRYKVNENPLYAPTSEHVNVLLTRTEDRIVWKTLAGDP
WIKTLTAKYPGNFTATIEEWQAEHDAIMRHILERPDPTDVFQNKANVCWAKALVPVLKTAGID
MTTEQWNTVDYFETDKAHSAEIVLNQLCVRFFGLDLDSGLFSAPTVPLSIRNNHWDNSPSPNMY
GLNKEVVRQLSRRYPQLPRAVATGRVYDMNTGTLRNYDPRINLVPVNRRLPHALVLHHNEHPQ
SDFSSFVSKLKGRTVLVVGEKLSVPGKMVDWLSDRPEATFRARLDLGIPGDVPKYDIIFVNVRTP
YKYHHYQQCEDHAIKLSMLTKKACLHLNPGGTCVSIGYGYADRASESIIGAIARQFKFSRVCKPK
SSLEETEVLFVFIGYDRKARTHNSYKLSSTLTNIYTGSRLHEAGCAPSYHVVRGDIATATEGVIIN
AANSKGQPGGGVCGALYKKFPESFDLQPIEVGKARLVKGAAKHIIHAVGPNFNKVSEVEGDKQL
AEAYESIAKIVNDNNYKSVAIPLLSTGIFSGNKDRLTQSLNHLLTALDTTDADVAIYCRDKKWEM
TLKEAVARREAVEEICISDDSSVTEPDAELVRVHPKSSLAGRKGYSTSDGKTFSYLEGTKFHQAA
KDIAEINAMWPVATEANEQVCMYILGESMSSIRSKCPVEESEASTPPSTLPCLCIHAMTPERVQRL
KASRPEQITVCSSFPLPKYRITGVQKIQCSQPILFSPKVPAYIHPRKYLVETPPVDETPEPSAENQST
EGTPEQPPLITEDETRTRTPEPIIIEEEEEDSISLLSDGPTHQVLQVEADIHGPPSVSSSSWSIPHASDF
DVDSLSILDTLEGASVTSGATSAETNSYFAKSMEFLARPVPAPRTVFRNPPHPAPRTRTPSLAPSR
ACSRTSLVSTPPGVNRVITREELEALTPSRTPSRSVSRTSLVSNPPGVNRVITREEFEAFVAQQQ*
second portion of VEEV Replicase (nsp1-4) Protein Sequence; Sequence
Type: Amino Acid; Star indicates stop codon; can be encoded by nucleotides 5702-7543 of SEQ ID NO:
2 (or a codon-optimized version of nucleotides 5702-7543 of SEQ ID NO: 2)
SEQ ID NO: 23
RFDAGAYIFSSDTGQGHLQQKSVRQTVLSEVVLERTELEISYAPRLDQEKEELLRKKLQLNPTPA
NRSRYQSRKVENMKAITARRILQGLGHYLKAEGKVECYRTLHPVPLYSSSVNRAFSSPKVAVEA
CNAMLKENFPTVASYCIIPEYDAYLDMVDGASCCLDTASFCPAKLRSFPKKHSYLEPTIRSAVPS
AIQNTLQNVLAAATKRNCNVTQMRELPVLDSAAFNVECFKKYACNNEYWETFKENPIRLTEEN
VVNYITKLKGPKAAALFAKTHNLNMLQDIPMDRFVMDLKRDVKVTPGTKHTEERPKVQVIQAA
DPLATAYLCGIHRELVRRLNAVLLPNIHTLFDMSAEDFDAIIAEHFQPGDCVLETDIASFDKSEDD
AMALTALMILEDLGVDAELLTLIEAAFGEISSIHLPTKTKFKFGAMMKSGMFLTLFVNTVINIVIA
SRVLRERLTGSPCAAFIGDDNIVKGVKSDKLMADRCATWLNMEVKIIDAVVGEKAPYFCGGFIL
CDSVTGTACRVADPLKRLFKLGKPLAADDEHDDDRRRALHEESTRWNRVGILSELCKAVESRYE
TVGTSIIVMAMTTLASSVKSFSYLRGAPITLYG*
Exemplary mCherry saRNA Template Sequence; Sequence Type: DNA; T7
promoter double-underlined (taatacgactcactata, SEQ ID NO: 3), AflII cut site dotted-
underlined (cttaag), mCherry sequence bolded, NdeI cut site zigzag-underlined (catatg)
SEQ ID NO: 5
taatacgactcactataatgggcggcgcatgagagaagcccagaccaattacctacccaaaatggagaaagttcacgttgacatcgaggaagacagcc
cattcctcagagctttgcagcggagcttcccgcagtttgaggtagaagccaagcaggtcactgataatgaccatgctaatgccagagcgttttcgcatctg
gcttcaaaactgatcgaaacggaggtggacccatccgacacgatccttgacattggaagtgcgcccgcccgcagaatgtattctaagcacaagtatcatt
gtatctgtccgatgagatgtgcggaagatccggacagattgtataagtatgcaactaagctgaagaaaaactgtaaggaaataactgataaggaattggac
aagaaaatgaaggagctggccgccgtcatgagcgaccctgacctggaaactgagactatgtgcctccacgacgacgagtcgtgtcgctacgaagggcaagt
cgctgtttaccaggatgtatacgcggttgacggaccgacaagtctctatcaccaagccaataagggagttagagtcgcctactggataggctttgacacca
ccccttttatgtttaagaacttggctggagcatatccatcatactctaccaactgggccgacgaaaccgtgttaacggctcgtaacataggcctatgcagct
ctgacgttatggagcggtcacgtagagggatgtccattcttagaaagaagtatttgaaaccatccaacaatgttctattctctgttggctcgaccatctac
cacgagaagagggacttactgaggagctggcacctgccgtctgtatttcacttacgtggcaagcaaaattacacatgtcggtgtgagactatagttagttgc
gacgggtacgtcgttaaaagaatagctatcagtccaggcctgtatgggaagccttcaggctatgctgctacgatgcaccgcgagggattcttgtgctgcaa
agtgacagacacattgaacggggagagggtctcttttcccgtgtgcacgtatgtgccagctacattgtgtgaccaaatgactggcatactggcaacagatg
tcagtgcggacgacgcgcaaaaactgctggttgggctcaaccagcgtatagtcgtcaacggtcgcacccagagaaacaccaataccatgaaaaattacctt
ttgcccgtagtggcccaggcatttgctaggtgggcaaaggaatataaggaagatcaagaagatgaaaggccactaggactacgagatagacagttagtcat
ggggtgttgttgggcttttagaaggcacaagataacatctatttataagcgcccggatacccaaaccatcatcaaagtgaacagcgatttccactcat
tcgtgctgcccaggataggcagtaacacattggagatcgggctgagaacaagaatcaggaaaatgttagaggagcacaaggagccgtcacctctcatta
ccgccgaggacgtacaagaagctaagtgcgcagccgatgaggctaaggaggtgcgtgaagccgaggagttgcgcgcagctctaccacctttggcag
ctgatgttgaggagcccactctggaggcagacgtcgacttgatgttacaagaggctggggccggctcagtggagacacctcgtggcttgataaaggtta
ccagctacgatggcgaggacaagatcggctcttacgctgtgctttctccgcaggctgtactcaagagtgaaaaattatcttgcatccaccctctcgctgaac
aagtcatagtgataacacactctggccgaaaagggcgttatgccgtggaaccataccatggtaaagtagtggtgccagagggacatgcaatacccgtcc
aggactttcaagctctgagtgaaagtgccaccattgtgtacaacgaacgtgagttcgtaaacaggtacctgcaccatattgccacacatggaggagcgct
gaacactgatgaagaatattacaaaactgtcaagcccagcgagcacgacggcgaatacctgtacgacatcgacaggaaacagtgcgtcaagaaagaa
ctagtcactgggctagggctcacaggcgagctggtggatcctcccttccatgaattcgcctacgagagtctgagaacacgaccagccgctccttaccaag
taccaaccataggggtgtatggcgtgccaggatcaggcaagtctggcatcattaaaagcgcagtcaccaaaaaagatctagtggtgagcgccaagaaa
gaaaactgtgcagaaattataagggacgtcaagaaaatgaaagggctggacgtcaatgccagaactgtggactcagtgctcttgaatggatgcaaacaccc
cgtagagaccctgtatattgacgaagcttttgcttgtcatgcaggtactctcagagcgctcatagccattataagacctaaaaaggcagtgctctgcgggg
atcccaaacagtgcggtttttttaacatgatgtgcctgaaagtgcattttaaccacgagatttgcacacaagtcttccacaaaagcatctctcgccgttgca
ctaaatctgtgacttcggtcgtctcaaccttgttttacgacaaaaaaatgagaacgacgaatccgaaagagactaagattgtgattgacactaccggcagt
accaaacctaagcaggacgatctcattctcacttgtttcagaggggggtgaagcagttgcaaatagattacaaaggcaacgaaataatgacggcagctgcc
tctcaagggctgacccgtaaaggtgtgtatgccgttcggtacaaggtgaatgaaaatcctctgtacgcacccacctcagaacatgtgaacgtcctactgac
ccgcacggaggaccgcatcgtgtggaaaacactagccggcgacccatggataaaaacactgactgccaagtaccctgggaatttcactgccacgatag
aggagtggcaagcagagcatgatgccatcatgaggcacatcttggagagaccggaccctaccgacgtcttccagaataaggcaaacgtgtgttgggcc
aaggctttagtgccggtgctgaagaccgctggcatagacatgaccactgaacaatggaacactgtggattattttgaaacggacaaagctcactcagcaga
gatagtattgaaccaactatgcgtgaggttctttggactcgatctggactccggtctattttctgcacccactgttccgttatccattaggaataatcact
gggataactccccgtcgcctaacatgtacgggctgaataaagaagtggtccgtcagctctctcgcaggtacccacaactgcctcgggcagttgccactggaa
gagtctatgacatgaacactggtacactgcgcaattatgatccgcgcataaacctagtacctgtaaacagaagactgcctcatgctttagtcctccaccata
atgaacacccacagagtgacttttcttcattcgtcagcaaattgaagggcagaactgtcctggtggtcggggaaaagttgtccgtcccaggcaaaatggttg
actggttgtcagaccggcctgaggctaccttcagagctcggctggatttaggcatcccaggtgatgtgcccaaatatgacataatatttgttaatgtgagga
ccccatataaataccatcactatcagcagtgtgaagaccatgccattaagcttagcatgttgaccaagaaagcttgtctgcatctgaatcccggcggaacct
gtgtcagcataggttatggttacgctgacagggccagcgaaagcatcattggtgctatagcgcggcagttcaagttttcccgggtatgcaaaccgaaatcct
cacttgaagagacggaagttctgtttgtattcattgggtacgatcgcaaggcccgtacgcacaattcttacaagctttcatcaaccttgaccaacatttata
caggttccagactccacgaagccggatgtgcaccctcatatcatgtggtgcgaggggatattgccacggccaccgaaggagtgattataaatgctgctaaca
gcaaaggacaacctggcggaggggtgtgcggagcgctgtataagaaattcccggaaagcttcgatttacagccgatcgaagtaggaaaagcgcgact
ggtcaaaggtgcagctaaacatatcattcatgccgtaggaccaaacttcaacaaagtttcggaggttgaaggtgacaaacagttggcagaggcttatgagtc
catcgctaagattgtcaacgataacaattacaagtcagtagcgattccactgttgtccaccggcatcttttccgggaacaaagatcgactaacccaatcatt
gaaccatttgctgacagctttagacaccactgatgcagatgtagccatatactgcagggacaagaaatgggaaatgactctcaaggaagcagtggctag
gagagaagcagtggaggagatatgcatatccgacgactcttcagtgacagaacctgatgcagagctggtgagggtgcatccgaagagttctttggctgg
aaggaagggctacagcacaagcgatggcaaaactttctcatatttggaagggaccaagtttcaccaggcggccaaggatatagcagaaattaatgccat
gtggcccgttgcaacggaggccaatgagcaggtatgcatgtatatcctcggagaaagcatgagcagtattaggtcgaaatgccccgtcgaagagtcgg
aagcctccacaccacctagcacgctgccttgcttgtgcatccatgccatgactccagaaagagtacagegcctaaaagcctcacgtccagaacaaattact
gtgtgctcatcctttccattgccgaagtatagaatcactggtgtgcagaagatccaatgctcccagcctatattgttctcaccgaaagtgcctgcgtatat
tcatccaaggaagtatctcgtggaaacaccaccggtagacgagactccggagccatoggcagagaaccaatccacagaggggacacctgaacaaccacc
acttataaccgaggatgagaccaggactagaacgcctgagccgatcatcatcgaagaggaagaagaggatagcataagtttgctgtcagatggcccgaccc
accaggtgctgcaagtcgaggcagacattcacgggccgccctctgtatctagctcatcctggtccattcctcatgcatccgactttgatgtggacagtt
tatccatacttgacaccctggagggagctagcgtgaccagcggggcaacgtcagccgagactaactcttacttcgcaaagagtatggagtttctggcgcg
accggtgcctgcgcctcgaacagtattcaggaaccctccacatcccgctcegcgcacaagaacaccgtcacttgcacccagcagggcctgctcgagaa
ccagcctagtttccaccccgccaggcgtgaatagggtgatcactagagaggagctcgaggcgcttaccccgtcacgcactcctagcaggtcggtctcga
gaaccagcctggtctccaacccgccaggcgtaaatagggtgattacaagagaggagtttgaggcgttcgtagcacaacaacaatgacggtttgatgcgg
gtgcatacatcttttcctccgacaccggtcaagggcatttacaacaaaaatcagtaaggcaaacggtgctatccgaagtggtgttggagaggaccgaattg
gagatttcgtatgccccgcgcctegaccaagaaaaagaagaattactacgcaagaaattacagttaaatcccacacctgctaacagaagcagataccagt
ccaggaaggtggagaacatgaaagccataacagctagacgtattctgcaaggcctagggcattatttgaaggcagaaggaaaagtggagtgctaccgaaccc
tgcatcctgttcctttgtattcatctagtgtgaaccgtgccttttcaagccccaaggtcgcagtggaagcctgtaacgccatgttgaaagagaactttccga
ctgtggcttcttactgtattattccagagtacgatgcctatttggacatggttgacggagcttcatgctgcttagacactgccagtttttgccctgcaaagc
tgcgcagctttccaaagaaacactcctatttggaacccacaatacgatcggcagtgccttcagcgatccagaacacgctccagaacgtcctggcagctgc
cacaaaaagaaattgcaatgtcacgcaaatgagagaattgcccgtattggattcggcggcctttaatgtggaatgcttcaagaaatatgcgtgtaataatga
atattgggaaacgtttaaagaaaaccccatcaggcttactgaagaaaacgtggtaaattacattaccaaattaaaaggaccaaaagctgctgctctttttgc
gaagacacataatttgaatatgttgcaggacataccaatggacaggtttgtaatggacttaaagagagacgtgaaagtgactccaggaacaaaacatactga
agaacggcccaaggtacaggtgatccaggctgccgatccgctagcaacagcgtatctgtgcggaatccaccgagagctggttaggagattaaatgcggtc
ctgcttccgaacattcatacactgtttgatatgtcggctgaagactttgacgctattatagccgagcacttccagcctggggattgtgttctggaaactgac
atcgcgtcgtttgataaaagtgaggacgacgccatggctctgaccgcgttaatgattctggaagacttaggtgtggacgcagagctgttgacgctgattgag
gcggctttcggcgaaatttcatcaatacatttgcccactaaaactaaatttaaattcggagccatgatgaaatctggaatgttcctcacactgtttgtgaaca
cagtcattaacattgtaatcgcaagcagagtgttgagagaacggctaaccggatcaccatgtgcagcattcattggagatgacaatatcgtgaaaggagtca
aatcggacaaattaatggcagacaggtgcgccacctggttgaatatggaagtcaagattatagatgctgtggtgggcgagaaagcgccttatttctgtgga
gggtttattttgtgtgactccgtgaccggcacagcgtgccgtgtggcagaccccctaaaaaggctgtttaagcttggcaaacctctggcagcagacgatga
acatgatgatgacaggagaagggcattgcatgaagagtcaacacgctggaaccgagtgggtattctttcagagctgtgcaaggcagtagaatcaaggtat
gaaaccgtaggaacttccatcatagttatggccatgactactctagctagcagtgttaaatcattcagctacctgagaggggcccctataactctctacggc

[chemical structure]

GGTGAGCAAGGGCGAGGAGGATAACATGGCCATCATCAAGGAGTTCATGCGCTTCAAG
GTGCACATGGAGGGCTCCGTGAACGGCCACGAGTTCGAGATCGAGGGCGAGGGCGAG
GGCCGCCCCTACGAGGGCACCCAGACCGCCAAGCTGAAGGTGACCAAGGGTGGCCCC
CTGCCCTTCGCCTGGGACATCCTGTCCCCTCAGTTCATGTACGGCTCCAAGGCCTACGT
GAAGCACCCCGCCGACATCCCCGACTACTTGAAGCTGTCCTTCCCCGAGGGCTTCAAG
TGGGAGCGCGTGATGAACTTCGAGGACGGCGGCGTGGTGACCGTGACCCAGGACTCC
TCCCTGCAGGACGGCGAGTTCATCTACAAGGTGAAGCTGCGCGGCACCAACTTCCCCT
CCGACGGCCCCGTAATGCAGAAGAAGACCATGGGCTGGGAGGCCTCCTCCGAGCGGA
TGTACCCCGAGGACGGCGCCCTGAAGGGCGAGATCAAGCAGAGGCTGAAGCTGAAGG
ACGGCGGCCACTACGACGCTGAGGTCAAGACCACCTACAAGGCCAAGAAGCCCGTGCA
GCTGCCCGGCGCCTACAACGTCAACATCAAGTTGGACATCACCTCCCACAACGAGGAC
TACACCATCGTGGAACAGTACGAACGCGCCGAGGGCCGCCACTCCACCGGCGGCATG

[chemical structure]

tttattttttcttttcttttccgaatcggattttgtttttaatatttcaaaaaaaaaaaaaaaaaaaaaaaaaa
Exemplary mCherry saRNA Sequence with Cytidine Substitution; Sequence
Type: RNA; AflII cut site dotted-underlined (nuuaag), mCherry sequence bolded, NdeI cut site zigzag-
underlined (nauaug); n indicates cytidine, 5-methylcytidine, or 5-hydroxymethylcytidine:
SEQ ID NO: 6
augggnggngnaugagagaagnnnagannaauuannuannnaaaauggagaaaguunanguuganaungaggaaganagnnnauunnu
nagagnuuugnagnggagnuunnngnaguuugagguagaagnnaagnaggunanugauaaugannaugnuaaugnnagagnguuuun
gnaunuggnuunaaaanugaungaaanggagguggannnaunnganangaunnuuganauuggaagugngnnngnnngnagaaugua
uunuaagnanaaguaunauuguaunugunngaugagaugugnggaagaunngganagauuguauaaguaugnaanuaagnugaagaaa
aanuguaaggaaauaanugauaaggaauugganaagaaaaugaaggagnuggnngnngunaugagngannnugannuggaaanugaga
nuaugugnnunnangangangagungugungnuangaagggnaagungnuguuuannaggauguauangngguuganggannganaa
gununuaunannaagnnaauaagggaguuagagungnnuanuggauaggnuuuganannannnnuuuuauguuuaagaanuuggnug
gagnauaunnaunauanunuannaanugggnngangaaannguguuaanggnunguaanauaggnnuaugnagnunuganguuaugg
agnggunanguagagggaugunnauunuuagaaagaaguauuugaaannaunnaanaauguunuauununuguuggnungannaunu
annangagaagaggganuuanugaggagnuggnannugnngunuguauuunanuuanguggnaagnaaaauuananaugunggugug
aganuauaguuaguugnganggguangunguuaaaagaauagnuaunagunnaggnnuguaugggaagnnuunaggnuaugnugnua
ngaugnanngngagggauunuugugnugnaaaguganagananauugaanggggagagggununuuuunnngugugnanguaugugn
nagnuanauugugugannaaauganuggnauanuggnaanagaugunagugnggangangngnaaaaanugnugguugggnunaann
agnguauagungunaanggungnannnagagaaanannaauannaugaaaaauuannuuuugnnnguaguggnnnaggnauuugnuag
gugggnaaaggaauauaaggaagaunaagaagaugaaaggnnanuagganuangagauaganaguuagunaugggguguuguugggnu
uuuagaaggnanaagauaanaunuauuuauaagngnnnggauannnaaannaunaunaaagugaanagngauuunnanunauungugn
ugnnnaggauaggnaguaananauuggagaungggnugagaanaagaaunaggaaaauguuagaggagnanaaggagnngunannunu
nauuanngnngagganguanaagaagnuaagugngnagnngaugaggnuaaggaggugngugaagnngaggaguugngngnagnunu
annannuuuggnagnugauguugaggagnnnanunuggaggnagangunganuugauguuanaagaggnuggggnnggnunagugga
ganannunguggnuugauaaagguuannagnuangauggngagganaagaunggnunuuangnugugnuuununngnaggnuguanu
naagagugaaaaauuaunuugnaunnannnunungnugaanaagunauagugauaanananunuggnngaaaagggnguuaugnngug
gaannauannaugguaaaguaguggugnnagaggganaugnaauannngunnagganuuunaagnunugagugaaagugnnannauug
uguanaangaangugaguunguaaanagguannugnannauauugnnananauggaggagngnugaananugaugaagaauauuanaa
aanugunaagnnnagngagnanganggngaauannuguanganaunganaggaaanagugngunaagaaagaanuagunanugggnua
gggnunanaggngagnugguggaunnunnnuunnaugaauungnnuangagagunugagaanangannagnngnunnuuannaagua
nnaannauagggguguauggngugnnaggaunaggnaagunuggnaunauuaaaagngnagunannaaaaaagaunuaguggugagng
nnaagaaagaaaanugugnagaaauuauaagggangunaagaaaaugaaagggnuggangunaaugnnagaanugugganunagugnu
nuugaauggaugnaaanannnnguagagannnuguauauugangaagnuuuugnuugunaugnagguanununagagngnunauagn
nauuauaagannuaaaaaggnagugnunugnggggaunnnaaanagugngguuuuuuuaanaugaugugnnugaaagugnauuuuaan
nangagauuugnananaagunuunnanaaaagnaununungnnguugnanuaaaunuguganuunggungununaannuuguuuuan
ganaaaaaaaugagaangangaaunngaaagaganuaagauugugauugananuannggnaguannaaannuaagnaggangaununau
ununanuuguuunagagggugggugaagnaguugnaaauagauuanaaaggnaangaaauaauganggnagnugnnununaagggnug
annnguaaagguguguaugnnguungguanaaggugaaugaaaaunnunuguangnannnannunagaanaugugaangunnuanug
annngnanggagganngnaunguguggaaaananuagnnggngannnauggauaaaaananuganugnnaaguannnugggaauuuna
nugnnangauagaggaguggnaagnagagnaugaugnnaunaugaggnanaunuuggagagannggannnuanngangunuunnaga
auaaggnaaanguguguugggnnaaggnuuuagugnnggugnugaaganngnuggnauaganaugannanugaanaauggaananug
uggauuauuuugaaangganaaagnunanunagnagagauaguauugaannaanuaugngugagguunuuugganungaunugganu
nnggunuauuuunugnannnanuguunnguuaunnauuaggaauaaunanugggauaanunnnngungnnuaanauguangggnuga
auaaagaaguggunngunagnununungnagguannnanaanugnnungggnaguugnnanuggaagagunuauganaugaananug
guananugngnaauuaugaunngngnauaaannuaguannuguaaanagaaganugnnunaugnuuuagunnunnannauaaugaana
nnnanagaguganuuuunuunauungunagnaaauugaagggnagaanugunnugguggunggggaaaaguugunngunnnaggnaa
aaugguuganugguugunagannggnnugaggnuannuunagagnunggnuggauuuaggnaunnnaggugaugugnnnaaauauga
nauaauauuuguuaaugugaggannnnauauaaauannaunanuaunagnagugugaagannaugnnauuaagnuuagnauguugann
aagaaagnuugunugnaunugaaunnnggnggaannugugunagnauagguuaugguuangnuganagggnnagngaaagnaunauu
ggugnuauagngnggnaguunaaguuuunnnggguaugnaaanngaaaunnunanuugaagaganggaaguunuguuuguauunauu
ggguangaungnaaggnnnguangnanaauunuuanaagnuuunaunaannuugannaanauuuauanagguunnaganunnangaag
nnggaugugnannnunauaunauguggugngaggggauauugnnanggnnanngaaggagugauuauaaaugnugnuaanagnaaag
ganaannuggnggaggggugugnggagngnuguauaagaaauunnnggaaagnuungauuuanagnngaungaaguaggaaaagngn
ganuggunaaaggugnagnuaaanauaunauunaugnnguaggannaaanuunaanaaaguuunggagguugaagguganaaanaguu
ggnagaggnuuaugagunnaungnuaagauugunaangauaanaauuanaagunaguagngauunnanuguugunnannggnaunuu
uunngggaanaaagaunganuaannnaaunauugaannauuugnuganagnuuuaganannanugaugnagauguagnnauauanugn
aggganaagaaaugggaaauganununaaggaagnaguggnuaggagagaagnaguggaggagauaugnauaunnganganunuunag
uganagaannugaugnagagnuggugagggugnaunngaagaguunuuuggnuggaaggaagggnuanagnanaagngauggnaaaan
uuununauauuuggaagggannaaguuunannaggnggnnaaggauauagnagaaauuaaugnnauguggnnnguugnaanggaggn
naaugagnagguaugnauguauaunnunggagaaagnaugagnaguauuaggungaaaugnnnngungaagagunggaagnnunnana
nnannuagnangnugnnuugnuugugnaunnaugnnauganunnagaaagaguanagngnnuaaaagnnunangunnagaanaaauua
nugugugnunaunnuuunnauugnngaaguauagaaunanuggugugnagaagaunnaaugnunnnagnnuauauuguununannga
aagugnnugnguauauunaunnaaggaaguaununguggaaanannanngguagangaganunnggagnnaunggnagagaannaaun
nanagagggganannugaanaannannanuuauaanngaggaugagannagganuagaangnnugagnngaunaunaungaagaggaa
gaagaggauagnauaaguuugnugunagauggnnngannnannaggugnugnaagungaggnaganauunangggnngnnnunugua
unuagnunaunnuggunnauunnunaugnaunnganuuugaugugganaguuuaunnauanuuganannnuggagggagnuagngug
annagnggggnaangunagnngaganuaanunuuanuungnaaagaguauggaguuunuggngngannggugnnugngnnungaana
guauunaggaannnunnanaunnngnunngngnanaagaananngunanuugnannnagnagggnnugnungagaannagnnuaguu
unnannnngnnaggngugaauagggugaunanuagagaggagnungaggngnuuannnngunangnanunnuagnaggunggunung
agaannagnnuggununnaannngnnaggnguaaauagggugauuanaagagaggaguuugaggnguunguagnanaanaanaaugan
gguuugaugngggugnauanaunuuuunnunnganannggunaagggnauuuanaanaaaaaunaguaaggnaaanggugnuaunng
aagugguguuggagagganngaauuggagauuunguaugnnnngngnnungannaagaaaaagaagaauuanuangnaagaaauuana
guuaaaunnnanannugnuaanagaagnagauannagunnaggaagguggagaanaugaaagnnauaanagnuaganguauunugnaa
ggnnuagggnauuauuugaaggnagaaggaaaaguggagugnuanngaannnugnaunnuguunnuuuguauunaunuagugugaan
ngugnnuuuunaagnnnnaaggungnaguggaagnnuguaangnnauguugaaagagaanuuunnganuguggnuunuuanuguauu
auunnagaguangaugnnuauuugganaugguuganggagnuunaugnugnuuagananugnnaguuuuugnnnugnaaagnugngn
agnuuunnaaagaaananunnuauuuggaannnanaauangaunggnagugnnuunagngaunnagaanangnunnagaangunnugg
nagnugnnanaaaaagaaauugnaaugunangnaaaugagagaauugnnnguauuggauunggnggnnuuuaauguggaaugnuunaa
gaaauaugnguguaauaaugaauauugggaaanguuuaaagaaaannnnaunaggnuuanugaagaaaangugguaaauuanauuanna
aauuaaaaggannaaaagnugnugnunuuuuugngaagananauaauuugaauauguugnagganauannaaugganagguuuguaau
gganuuaaagagagangugaaaguganunnaggaanaaaanauanugaagaanggnnnaagguanaggugaunnaggnugnngaunng
nuagnaanagnguaunugugnggaaunnanngagagnugguuaggagauuaaaugnggunnugnuunngaanauunauananuguuu
gauaugunggnugaaganuuugangnuauuauagnngagnanuunnagnnuggggauuguguunuggaaanuganaungngunguuu
gauaaaagugaggangangnnauggnunuganngnguuaaugauunuggaaganuuagguguggangnagagnuguugangnugauu
gaggnggnuuunggngaaauuunaunaauanauuugnnnanuaaaanuaaauuuaaauunggagnnaugaugaaaunuggaauguunn
unananuguuugugaananagunauuaanauuguaaungnaagnagaguguugagagaanggnuaannggaunannaugugnagnauu
nauuggagauganaauaungugaaaggagunaaaungganaaauuaauggnaganaggugngnnannugguugaauauggaagunaag
auuauagaugnuguggugggngagaaagngnnuuauuunuguggaggguuuauuuuguguganunngugannggnanagngugnng
uguggnagannnnnuaaaaaggnuguuuaagnuuggnaaannunuggnagnagangaugaanaugaugauganaggagaagggnauug
naugaagagunaanangnuggaanngaguggguauunuuunagagnugugnaaggnaguagaaunaagguaugaaannguaggaanuu
nnaunauaguuauggnnauganuanunuagnuagnaguguuaaaunauunagnuannugagaggggnnnnuauaanununuanggnu
aannugaaugganuanganauagunuagunngnnaagunuagnaGGAGAgunnngannunnaggagagannagggnnannnuuaa

[chemical structure]

GNUUNAAGGUGNANAUGGAGGGNUNNGUGAANGGNNANGAGUUNGAGAUNGAGGGNG
AGGGNGAGGGNNGNNNNUANGAGGGNANNNAGANNGNNAAGNUGAAGGUGANNAAGG
GUGGNNNNNUGNNNUUNGNNUGGGANAUNNUGUNNNNUNAGUUNAUGUANGGNUNNA
AGGNNUANGUGAAGNANNNNGNNGANAUNNNNGANUANUUGAAGNUGUNNUUNNNNG
AGGGNUUNAAGUGGGAGNGNGUGAUGAANUUNGAGGANGGNGGNGUGGUGANNGUG
ANNNAGGANUNNUNNNUGNAGGANGGNGAGUUNAUNUANAAGGUGAAGNUGNGNGGN
ANNAANUUNNNNUNNGANGGNNNNGUAAUGNAGAAGAAGANNAUGGGNUGGGAGGNN
UNNUNNGAGNGGAUGUANNNNGAGGANGGNGNNNUGAAGGGNGAGAUNAAGNAGAGG
NUGAAGNUGAAGGANGGNGGNNANUANGANGNUGAGGUNAAGANNANNUANAAGGNN
AAGAAGNNNGUGNAGNUGNNNGGNGNNUANAANGUNAANAUNAAGUUGGANAUNANN
UNNNANAANGAGGANUANANNAUNGUGGAANAGUANGAANGNGNNGAGGGNNGNNAN

[chemical structure]

ngnggngauuggnaugnngnnuuaaaauuuuuuuuuauuuuuunuuuuuuuunngaaunggauuuuguuuuuaauauuunaaaaa
aaaaaaaaaaaaaaaaaaaaa
Exemplary mCherry saRNA Sequence with Uridine Substitution; Sequence
Type: RNA; AflII cut site dotted-underlined (cnnaag), mCherry sequence bolded, NdeI cut site zigzag-
underlined (canang); n indicates uridine, 5-methyluridine, or 5-hydroxymethyluridine:
SEQ ID NO: 7
angggcggcgcangagagaagcccagaccaannaccnacccaaaanggagaaagnncacgnngacancgaggaagacagcccannccncag
agcnnngcagcggagcnncccgcagnnngaggnagaagccaagcaggncacnganaangaccangcnaangccagagcgnnnncgcancn
ggcnncaaaacngancgaaacggaggnggacccanccgacacganccnngacannggaagngcgcccgcccgcagaangnanncnaagca
caagnancanngnancngnccgangagangngcggaaganccggacaganngnanaagnangcaacnaagcngaagaaaaacngnaagga
aanaacnganaaggaannggacaagaaaangaaggagcnggccgccgncangagcgacccngaccnggaaacngagacnangngccncca
cgacgacgagncgngncgcnacgaagggcaagncgcngnnnaccaggangnanacgcggnngacggaccgacaagncncnancaccaagc
caanaagggagnnagagncgccnacngganaggcnnngacaccaccccnnnnangnnnaagaacnnggcnggagcananccancanacnc
naccaacngggccgacgaaaccgngnnaacggcncgnaacanaggccnangcagcncngacgnnanggagcggncacgnagagggangnc
canncnnagaaagaagnannngaaaccanccaacaangnncnanncncngnnggcncgaccancnaccacgagaagagggacnnacngag
gagcnggcaccngccgncngnannncacnnacgnggcaagcaaaannacacangncggngngagacnanagnnagnngcgacgggnacg
ncgnnaaaagaanagcnancagnccaggccngnangggaagccnncaggcnangcngcnacgangcaccgcgaggganncnngngcngc
aaagngacagacacanngaacggggagagggncncnnnncccgngngcacgnangngccagcnacanngngngaccaaangacnggcan
acnggcaacagangncagngcggacgacgcgcaaaaacngcnggnngggcncaaccagcgnanagncgncaacggncgcacccagagaaa
caccaanaccangaaaaannaccnnnngcccgnagnggcccaggcannngcnaggngggcaaaggaananaaggaagancaagaaganga
aaggccacnaggacnacgaganagacagnnagncanggggngnngnngggcnnnnagaaggcacaaganaacancnannnanaagcgcc
cgganacccaaaccancancaaagngaacagcgannnccacncanncgngcngcccagganaggcagnaacacannggagancgggcnga
gaacaagaancaggaaaangnnagaggagcacaaggagccgncaccncncannaccgccgaggacgnacaagaagcnaagngcgcagccga
ngaggcnaaggaggngcgngaagccgaggagnngcgcgcagcncnaccaccnnnggcagcngangnngaggagcccacncnggaggcag
acgncgacnngangnnacaagaggcnggggccggcncagnggagacaccncgnggcnnganaaaggnnaccagcnacganggcgaggac
aagancggcncnnacgcngngcnnncnccgcaggcngnacncaagagngaaaaannancnngcanccacccncncgcngaacaagncana
gnganaacacacncnggccgaaaagggcgnnangccgnggaaccanaccanggnaaagnagnggngccagagggacangcaanacccgnc
caggacnnncaagcncngagngaaagngccaccanngngnacaacgaacgngagnncgnaaacaggnaccngcaccananngccacacan
ggaggagcgcngaacacngangaagaanannacaaaacngncaagcccagcgagcacgacggcgaanaccngnacgacancgacaggaaac
agngcgncaagaaagaacnagncacngggcnagggcncacaggcgagcnggngganccncccnnccangaanncgccnacgagagncnga
gaacacgaccagccgcnccnnaccaagnaccaaccanaggggngnanggcgngccaggancaggcaagnnggcancannaaaagcgcag
ncaccaaaaaagancnagnggngagcgccaagaaagaaaacngngcagaaannanaagggacgncaagaaaangaaagggcnggacgncaa
ngccagaacngnggacncagngcncnngaanggangcaaacaccccgnagagacccngnananngacgaagcnnnngcnngncangcag
gnacncncagagcgcncanagccannanaagaccnaaaaaggcagngcncngcggggancccaaacagngcggnnnnnnnaacangangn
gccngaaagngcannnnaaccacgagannngcacacaagncnnccacaaaagcancncncgccgnngcacnaaancngngacnncggncg
ncncaaccnngnnnnacgacaaaaaaangagaacgacgaanccgaaagagacnaaganngnganngacacnaccggcagnaccaaaccnaa
gcaggacgancncanncncacnngnnncagaggggggngaagcagnngcaaanagannacaaaggcaacgaaanaangacggcagcngc
cncncaagggcngacccgnaaaggngngnangccgnncggnacaaggngaangaaaanccncngnacgcacccaccncagaacangngaa
cgnccnacngacccgcacggaggaccgcancgngnggaaaacacnagccggcgacccangganaaaaacacngacngccaagnacccnggg
aannncacngccacganagaggagnggcaagcagagcangangccancangaggcacancnnggagagaccggacccnaccgacgncnnc
cagaanaaggcaaacgngngnngggccaaggcnnnagngccggngcngaagaccgcnggcanagacangaccacngaacaanggaacacn
gnggannannnngaaacggacaaagcncacncagcagaganagnanngaaccaacnangcgngaggnncnnnggacncgancnggacnc
cggncnannnncngcacccacngnnccgnnanccannaggaanaancacnggganaacnccccgncgccnaacangnacgggcngaanaa
agaagnggnccgncagcncncncgcaggnacccacaacngccncgggcagnngccacnggaagagncnangacangaacacnggnacacn
gcgcaannanganccgcgcanaaaccnagnaccngnaaacagaagacngccncangcnnnagnccnccaccanaangaacacccacagagn
gacnnnncnncanncgncagcaaanngaagggcagaacngnccnggnggncggggaaaagnngnccgncccaggcaaaanggnngacng
gnngncagaccggccngaggcnaccnncagagcncggcnggannnaggcancccaggngangngcccaaanangacanaanannngnna
angngaggaccccananaaanaccancacnancagcagngngaagaccangccannaagcnnagcangnngaccaagaaagcnngncngc
ancngaancccggcggaaccngngncagcanaggnnanggnnacgcngacagggccagcgaaagcancannggngcnanagcgcggcag
nncaagnnnncccgggnangcaaaccgaaanccncacnngaagagacggaagnncngnnngnanncanngggnacgancgcaaggcccg
nacgcacaanncnnacaagcnnncancaaccnngaccaacannnanacaggnnccagacnccacgaagccggangngcacccncanancan
gnggngcgaggggananngccacggccaccgaaggagngannanaaangcngcnaacagcaaaggacaaccnggcggaggggngngcgg
agcgcngnanaagaaanncccggaaagcnncgannnacagccgancgaagnaggaaaagcgcgacnggncaaaggngcagcnaaacanan
canncangccgnaggaccaaacnncaacaaagnnncggaggnngaaggngacaaacagnnggcagaggcnnangagnccancgcnaagan
ngncaacganaacaannacaagncagnagcgannccacngnngnccaccggcancnnnnccgggaacaaagancgacnaacccaancann
gaaccannngcngacagcnnnagacaccacngangcagangnagccananacngcagggacaagaaangggaaangacncncaaggaagc
agnggcnaggagagaagcagnggaggaganangcananccgacgacncnncagngacagaaccngangcagagcnggngagggngcanc
cgaagagnncnnnggcnggaaggaagggcnacagcacaagcganggcaaaacnnncncanannnggaagggaccaagnnncaccaggcgg
ccaaggananagcagaaannaangccangnggcccgnngcaacggaggccaangagcaggnangcangnananccncggagaaagcanga
gcagnannaggncgaaangccccgncgaagagncggaagccnccacaccaccnagcacgcngccnngcnngngcanccangccangacnc
cagaaagagnacagcgccnaaaagccncacgnccagaacaaannacngngngcncanccnnnccanngccgaagnanagaancacnggng
ngcagaaganccaangcncccagccnananngnncncaccgaaagngccngcgnananncanccaaggaagnancncgnggaaacaccac
cggnagacgagacnccggagccancggcagagaaccaanccacagaggggacaccngaacaaccaccacnnanaaccgaggangagaccag
gacnagaacgccngagccgancancancgaagaggaagaagagganagcanaagnnngcngncaganggcccgacccaccaggngcngca
agncgaggcagacanncacgggccgcccncngnancnagcncanccnggnccannccncangcanccgacnnngangnggacagnnnanc
canacnngacacccnggagggagcnagcgngaccagcggggcaacgncagccgagacnaacncnnacnncgcaaagagnanggagnnncn
ggcgcgaccggngccngcgccncgaacagnanncaggaacccnccacancccgcnccgcgcacaagaacaccgncacnngcacccagcagg
gccngcncgagaaccagccnagnnnccaccccgccaggcgngaanagggngancacnagagaggagcncgaggcgcnnaccccgncacgc
acnccnagcaggncggncncgagaaccagccnggncnccaacccgccaggcgnaaanagggngannacaagagaggagnnngaggcgnnc
gnagcacaacaacaangacggnnngangcgggngcanacancnnnnccnccgacaccggncaagggcannnacaacaaaaancagnaagg
caaacggngcnanccgaagnggngnnggagaggaccgaannggagannncgnangccccgcgccncgaccaagaaaaagaagaannacna
cgcaagaaannacagnnaaancccacaccngcnaacagaagcaganaccagnccaggaaggnggagaacangaaagccanaacagcnagac
gnanncngcaaggccnagggcannannngaaggcagaaggaaaagnggagngcnaccgaacccngcanccngnnccnnngnanncancn
agngngaaccgngccnnnncaagccccaaggncgcagnggaagccngnaacgccangnngaaagagaacnnnccgacngnggcnncnnac
ngnannannccagagnacgangccnannnggacanggnngacggagcnncangcngcnnagacacngccagnnnnngcccngcaaagcn
gcgcagcnnnccaaagaaacacnccnannnggaacccacaanacgancggcagngccnncagcganccagaacacgcnccagaacgnccng
gcagcngccacaaaaagaaanngcaangncacgcaaangagagaanngcccgnanngganncggcggccnnnaangnggaangcnncaag
aaanangcgngnaanaangaananngggaaacgnnnaaagaaaaccccancaggcnnacngaagaaaacgnggnaaannacannaccaaa
nnaaaaggaccaaaagcngcngcncnnnnngcgaagacacanaannngaanangnngcaggacanaccaanggacaggnnngnaanggac
nnaaagagagacgngaaagngacnccaggaacaaaacanacngaagaacggcccaaggnacaggnganccaggcngccganccgcnagcaa
cagcgnancngngcggaanccaccgagagcnggnnaggagannaaangcggnccngcnnccgaacanncanacacngnnnganangncg
gcngaagacnnngacgcnannanagccgagcacnnccagccngggganngngnncnggaaacngacancgcgncgnnnganaaaagnga
ggacgacgccanggcncngaccgcgnnaanganncnggaagacnnaggngnggacgcagagcngnngacgcnganngaggcggcnnncg
gcgaaannncancaanacannngcccacnaaaacnaaannnaaanncggagccangangaaancnggaangnnccncacacngnnngnga
acacagncannaacanngnaancgcaagcagagngnngagagaacggcnaaccggancaccangngcagcanncannggagangacaana
ncgngaaaggagncaaancggacaaannaanggcagacaggngcgccaccnggnngaananggaagncaagannanagangcngnggng
ggcgagaaagcgccnnannncngnggagggnnnannnngngngacnccgngaccggcacagcgngccgngnggcagacccccnaaaaag
gcngnnnaagcnnggcaaaccncnggcagcagacgangaacangangangacaggagaagggcanngcangaagagncaacacgcnggaa
ccgagngggnanncnnncagagcngngcaaggcagnagaancaaggnangaaaccgnaggaacnnccancanagnnanggccangacnac
ncnagcnagcagngnnaaancanncagcnaccngagaggggccccnanaacncncnacggcnaaccngaanggacnacgacanagncnag

[chemical structure]

GAGGAGGANAACANGGCCANCANCAAGGAGNNCANGCGCNNCAAGGNGCACANGGAG
GGCNCCGNGAACGGCCACGAGNNCGAGANCGAGGGCGAGGGCGAGGGCCGCCCCNAC
GAGGGCACCCAGACCGCCAAGCNGAAGGNGACCAAGGGNGGCCCCCNGCCCNNCGCC
NGGGACANCCNGNCCCCNCAGNNCANGNACGGCNCCAAGGCCNACGNGAAGCACCCC
GCCGACANCCCCGACNACNNGAAGCNGNCCNNCCCCGAGGGCNNCAAGNGGGAGCGC
GNGANGAACNNCGAGGACGGCGGCGNGGNGACCGNGACCCAGGACNCCNCCCNGCAG
GACGGCGAGNNCANCNACAAGGNGAAGCNGCGCGGCACCAACNNCCCCNCCGACGGC
CCCGNAANGCAGAAGAAGACCANGGGCNGGGAGGCCNCCNCCGAGCGGANGNACCCC
GAGGACGGCGCCCNGAAGGGCGAGANCAAGCAGAGGCNGAAGCNGAAGGACGGCGG
CCACNACGACGCNGAGGNCAAGACCACCNACAAGGCCAAGAAGCCCGNGCAGCNGCC
CGGCGCCNACAACGNCAACANCAAGNNGGACANCACCNCCCACAACGAGGACNACACC
ANCGNGGAACAGNACGAACGCGCCGAGGGCCGCCACNCCACCGGCGGCANGGACGAG

[chemical structure]

nnnnannnnnnnnnnnnnnccgaancggannnngnnnnnaanannncaaaaaaaaaaaaaaaaaaaaaaaaaa

[0988] The saRNAs described herein can self-replicate due to inclusion of conserved sequence elements (CSEs) located on the 5′ and 3′ ends of the RNA in combination with protein machinery (RNA-dependent RNA polymerase or RdRp) encoded by the coding sequences for nsp1-4. The saRNA can also include amplification of a sub-genomic RNA, e.g., encoding the cargo of interest, from a subgenomic promoter (SGP) that is recognized by the RdRp. As such, the exemplary saRNAs described herein can comprise at least the following domains: nsp1-4 (see e.g., nucleotides 62-5701 of SEQ ID NO: 2 and nucleotides 5702-7543 of SEQ ID NO: 2, which translate to SEQ ID NO: 4 and SEQ ID NO: 23, respectively); 3′ CSE; 5′ CSE; and/or a SGP.

[0989] The conserved 3′-conserved sequence element (3′ CSE) is encoded in the 3′ UTR and is dependent on the viral machinery (e.g., nsP1-4) used in the saRNA. For VEEV, the 3′ CSE is in the 3′ UTR sequence and can comprise: catgccgccttaaaatttttattttattttttcttttcttttccgaatcggattttgtttttaatatttc, SEQ ID NO: 9 (see e.g., nucleotides 7673-7742 of SEQ ID NO: 2).

[0990] The conserved 5′ sequence element (5′ CSE) is contained in the nsp1 coding sequence and is 51 nt. The 5′ CSE is also dependent on viral machinery (e.g., nsP1-4) used to generate the saRNA. For VEEV, the 5′ CSE can comprise: aagcaggtcactgataatgaccatgctaatgccagagcgttttcgcatctg, SEQ ID NO: 10 (see e.g., nucleotides 149-199 of SEQ ID NO: 2).

[0991] The subgenomic promoter (SGP) is located at the end of nsp4 and contains sequences within and after the coding sequence of nsp4. This is also dependent on viral machinery (e.g., nsP1-4) used to generate the saRNA. The sequence for the SGP in VEEV can comprise: SEQ ID NO: 11, agcttggcaaacctctggcagcagacgatgaacatgatgatgacaggagaagggcattgcatgaagagtcaacacgctggaaccgagtgggtattcttt cagagetgtgcaaggcagtagaatcaaggtatgaaaccgtaggaaettecatcatagttatggecatgactactetagetagcagtgttaaatcatteaget acctgagaggggcccctataactctctacggctaacctgaatggactacgacatagtctagtccgccaag (see e.g., nucleotides 7308-7578 of SEQ ID NO: 2).

SEQ ID NO: 21, Exemplary SARS-CoV-2 saRNA vaccine sequence; spike sequence bolded
(aa 7599-11384 of SEQ ID NO: 21)
atgggcggcgcatgagagaagcccagaccaattacctacccaaaatggagaaagttcacgttgacatcgaggaagacagcccattcctcagagctttgc
agcggagcttcccgcagtttgaggtagaagccaagcaggtcactgataatgaccatgctaatgccagagcgttttcgcatctggcttcaaaactgatcgaa
acggaggtggacccatccgacacgatccttgacattggaagtgcgcccgcccgcagaatgtattctaagcacaagtatcattgtatctgtccgatgagatg
tgcggaagatccggacagattgtataagtatgcaactaagctgaagaaaaactgtaaggaaataactgataaggaattggacaagaaaatgaaggagct
ggccgccgtcatgagcgaccctgacctggaaactgagactatgtgcctccacgacgacgagtcgtgtcgctacgaagggcaagtcgctgtttaccagg
atgtatacgcggttgacggaccgacaagtctctatcaccaagccaataagggagttagagtcgcctactggataggctttgacaccaccccttttatgtttaa
gaacttggctggagcatatccatcatactctaccaactgggccgacgaaaccgtgttaacggctcgtaacataggcctatgcagctctgacgttatggagc
ggtcacgtagagggatgtccattcttagaaagaagtatttgaaaccatccaacaatgttctattctctgttggctcgaccatctaccacgagaagagggactt
actgaggagctggcacctgccgtctgtatttcacttacgtggcaagcaaaattacacatgtcggtgtgagactatagttagttgcgacgggtacgtcgttaa
aagaatagctatcagtccaggcctgtatgggaagccttcaggctatgctgctacgatgcaccgcgagggattcttgtgctgcaaagtgacagacacattg
aacggggagagggtctcttttcccgtgtgcacgtatgtgccagctacattgtgtgaccaaatgactggcatactggcaacagatgtcagtgcggacgacg
cgcaaaaactgctggttgggctcaaccagcgtatagtcgtcaacggtcgcacccagagaaacaccaataccatgaaaaattaccttttgcccgtagtggc
ccaggcatttgctaggtgggcaaaggaatataaggaagatcaagaagatgaaaggccactaggactacgagatagacagttagtcatggggtgttgttg
ggcttttagaaggcacaagataacatctatttataagcgcccggatacccaaaccatcatcaaagtgaacagcgatttccactcattcgtgctgcccaggat
aggcagtaacacattggagatcgggctgagaacaagaatcaggaaaatgttagaggagcacaaggagccgtcacctctcattaccgccgaggacgta
caagaagctaagtgcgcagccgatgaggctaaggaggtgcgtgaagccgaggagttgcgcgcagctctaccacctttggcagctgatgttgaggagc
ccactctggaggcagacgtcgacttgatgttacaagaggctggggccggctcagtggagacacctcgtggcttgataaaggttaccagctacgatggcg
aggacaagatcggctcttacgctgtgctttctccgcaggctgtactcaagagtgaaaaattatcttgcatccaccctctcgctgaacaagtcatagtgataac
acactctggccgaaaagggcgttatgccgtggaaccataccatggtaaagtagtggtgccagagggacatgcaatacccgtccaggactttcaagctct
gagtgaaagtgccaccattgtgtacaacgaacgtgagttcgtaaacaggtacctgcaccatattgccacacatggaggagcgctgaacactgatgaaga
atattacaaaactgtcaagcccagcgagcacgacggcgaatacctgtacgacatcgacaggaaacagtgcgtcaagaaagaactagtcactgggctag
ggctcacaggcgagctggtggatcctcccttccatgaattcgcctacgagagtctgagaacacgaccagccgctccttaccaagtaccaaccatagggg
tgtatggcgtgccaggatcaggcaagtctggcatcattaaaagcgcagtcaccaaaaaagatctagtggtgagcgccaagaaagaaaactgtgcagaa
attataagggacgtcaagaaaatgaaagggctggacgtcaatgccagaactgtggactcagtgctcttgaatggatgcaaacaccccgtagagaccctg
tatattgacgaagcttttgcttgtcatgcaggtactctcagagcgctcatagccattataagacctaaaaaggcagtgctctgcggggatcccaaacagtgc
ggtttttttaacatgatgtgcctgaaagtgcattttaaccacgagatttgcacacaagtcttccacaaaagcatctctcgccgttgcactaaatctgtgacttcg
gtcgtctcaaccttgttttacgacaaaaaaatgagaacgacgaatccgaaagagactaagattgtgattgacactaccggcagtaccaaacctaagcagg
acgatctcattctcacttgtttcagagggtgggtgaagcagttgcaaatagattacaaaggcaacgaaataatgacggcagctgcctctcaagggctgacc
cgtaaaggtgtgtatgccgttcggtacaaggtgaatgaaaatcctctgtacgcacccacctcagaacatgtgaacgtcctactgacccgcacggaggacc
gcatcgtgtggaaaacactagccggcgacccatggataaaaacactgactgccaagtaccctgggaatttcactgccacgatagaggagtggcaagca
gagcatgatgccatcatgaggcacatcttggagagaccggaccctaccgacgtcttccagaataaggcaaacgtgtgttgggccaaggctttagtgccg
gtgctgaagaccgctggcatagacatgaccactgaacaatggaacactgtggattattttgaaacggacaaagctcactcagcagagatagtattgaacc
aactatgcgtgaggttctttggactcgatctggactccggtctattttctgcacccactgttccgttatccattaggaataatcactgggataactccccgtcgc
ctaacatgtacgggctgaataaagaagtggtccgtcagctctctcgcaggtacccacaactgcctcgggcagttgccactggaagagtctatgacatgaa
cactggtacactgcgcaattatgatccgcgcataaacctagtacctgtaaacagaagactgcctcatgctttagtcctccaccataatgaacacccacaga
gtgacttttcttcattcgtcagcaaattgaagggcagaactgtcctggtggtcggggaaaagttgtccgtcccaggcaaaatggttgactggttgtcagacc
ggcctgaggctaccttcagagctcggctggatttaggcatcccaggtgatgtgcccaaatatgacataatatttgttaatgtgaggaccccatataaatacc
atcactatcagcagtgtgaagaccatgccattaagcttagcatgttgaccaagaaagcttgtctgcatctgaatcccggcggaacctgtgtcagcataggtt
atggttacgctgacagggccagcgaaagcatcattggtgctatagcgcggcagttcaagttttcccgggtatgcaaaccgaaatcctcacttgaagagac
ggaagttctgtttgtattcattgggtacgatcgcaaggcccgtacgcacaattcttacaagctttcatcaaccttgaccaacatttatacaggttccagactcca
cgaagccggatgtgcaccctcatatcatgtggtgcgaggggatattgccacggccaccgaaggagtgattataaatgctgctaacagcaaaggacaacc
tggcggaggggtgtgcggagcgctgtataagaaattcccggaaagcttcgatttacagccgatcgaagtaggaaaagcgcgactggtcaaaggtgcag
ctaaacatatcattcatgccgtaggaccaaacttcaacaaagtttcggaggttgaaggtgacaaacagttggcagaggcttatgagtccatcgctaagattg
tcaacgataacaattacaagtcagtagcgattccactgttgtccaccggcatcttttccgggaacaaagatcgactaacccaatcattgaaccatttgctgac
agctttagacaccactgatgcagatgtagccatatactgcagggacaagaaatgggaaatgactctcaaggaagcagtggctaggagagaagcagtgg
aggagatatgcatatccgacgactcttcagtgacagaacctgatgcagagctggtgagggtgcatccgaagagttctttggctggaaggaagggctaca
gcacaagcgatggcaaaactttctcatatttggaagggaccaagtttcaccaggcggccaaggatatagcagaaattaatgccatgtggcccgttgcaac
ggaggccaatgagcaggtatgcatgtatatcctcggagaaagcatgagcagtattaggtcgaaatgccccgtcgaagagtcggaagcctccacaccac
ctagcacgctgccttgcttgtgcatccatgccatgactccagaaagagtacagcgcctaaaagcctcacgtccagaacaaattactgtgtgctcatcctttc
cattgccgaagtatagaatcactggtgtgcagaagatccaatgctcccagcctatattgttctcaccgaaagtgcctgcgtatattcatccaaggaagtatct
cgtggaaacaccaccggtagacgagactccggagccatcggcagagaaccaatccacagaggggacacctgaacaaccaccacttataaccgagga
tgagaccaggactagaacgcctgagccgatcatcatcgaagaggaagaagaggatagcataagtttgctgtcagatggcccgacccaccaggtgctgc
aagtcgaggcagacattcacgggccgccctctgtatctagctcatcctggtccattcctcatgcatccgactttgatgtggacagtttatccatacttgacacc
ctggagggagctagcgtgaccagcggggcaacgtcagccgagactaactcttacttcgcaaagagtatggagtttctggcgcgaccggtgcctgcgcc
tcgaacagtattcaggaaccctccacatcccgctccgcgcacaagaacaccgtcacttgcacccagcagggcctgctcgagaaccagcctagtttccac
cccgccaggcgtgaatagggtgatcactagagaggagctcgaggcgcttaccccgtcacgcactcctagcaggtcggtctcgagaaccagcctggtct
ccaacccgccaggcgtaaatagggtgattacaagagaggagtttgaggcgttcgtagcacaacaacaatgacggtttgatgcgggtgcatacatcttttc
ctccgacaccggtcaagggcatttacaacaaaaatcagtaaggcaaacggtgctatccgaagtggtgttggagaggaccgaattggagatttcgtatgcc
ccgcgcctcgaccaagaaaaagaagaattactacgcaagaaattacagttaaatcccacacctgctaacagaagcagataccagtccaggaaggtgga
gaacatgaaagccataacagctagacgtattctgcaaggcctagggcattatttgaaggcagaaggaaaagtggagtgctaccgaaccctgcatcctgtt
cctttgtattcatctagtgtgaaccgtgccttttcaagccccaaggtcgcagtggaagcctgtaacgccatgttgaaagagaactttccgactgtggcttctta
ctgtattattccagagtacgatgcctatttggacatggttgacggagcttcatgctgcttagacactgccagtttttgccctgcaaagctgcgcagctttccaa
agaaacactcctatttggaacccacaatacgatcggcagtgccttcagcgatccagaacacgctccagaacgtcctggcagctgccacaaaaagaaatt
gcaatgtcacgcaaatgagagaattgcccgtattggattcggcggcctttaatgtggaatgcttcaagaaatatgcgtgtaataatgaatattgggaaacgtt
taaagaaaaccccatcaggcttactgaagaaaacgtggtaaattacattaccaaattaaaaggaccaaaagctgctgctctttttgcgaagacacataatttg
aatatgttgcaggacataccaatggacaggtttgtaatggacttaaagagagacgtgaaagtgactccaggaacaaaacatactgaagaacggcccaag
gtacaggtgatccaggctgccgatccgctagcaacagcgtatctgtgcggaatccaccgagagctggttaggagattaaatgcggtcctgcttccgaaca
ttcatacactgtttgatatgtcggctgaagactttgacgctattatagccgagcacttccagcctggggattgtgttctggaaactgacatcgcgtcgtttgata
aaagtgaggacgacgccatggctctgaccgcgttaatgattctggaagacttaggtgtggacgcagagctgttgacgctgattgaggcggctttcggcga
aatttcatcaatacatttgcccactaaaactaaatttaaattcggagccatgatgaaatctggaatgttcctcacactgtttgtgaacacagtcattaacattg
taatcgcaagcagagtgttgagagaacggctaaccggatcaccatgtgcagcattcattggagatgacaatatcgtgaaaggagtcaaatcggacaaattaa
tggcagacaggtgcgccacctggttgaatatggaagtcaagattatagatgctgtggtgggcgagaaagcgccttatttctgtggagggtttattttgtgtga
ctccgtgaccggcacagcgtgccgtgtggcagaccccctaaaaaggctgtttaagcttggcaaacctctggcagcagacgatgaacatgatgatgacag
gagaagggcattgcatgaagagtcaacacgctggaaccgagtgggtattctttcagagctgtgcaaggcagtagaatcaaggtatgaaaccgtaggaac
ttccatcatagttatggccatgactactctagctagcagtgttaaatcattcagctacctgagaggggcccctataactctctacggctaacctgaatggacta
cgacatagtctagtccgccaagtctagcaggagagtcccgacctccaggagagaccagggccacccttaaggccgccaccatgtttgtgttcttggtg
ttgcttccactggtcagttcccaatgcgttaatctcaccacccgaactcaactcccacccgcatatacaaattccttcaccagaggagtgtactatc
ctgacaaagtgtttcggtcaagtgtcctccactctactcaggacctctttctgcctttcttttctaacgttacatggtttcatgcaatccatgtgtctgg
gacaaacggcaccaaacgcttcgacaaccctgtattgccattcaatgatggggtgtactttgcctccacagagaaatccaacatcattcgaggat
ggattttcgggactactctggactcaaagacacagagcctgctgatcgttaacaacgccacaaacgttgtcatcaaagtgtgcgaattccagtttt
gcaatgatcccttcctgggagtgtactatcacaagaataacaagtcctggatggagagcgaatttcgggtctacagcagcgcaaacaactgcac
cttcgagtacgtgagtcaaccctttctgatggacctggaagggaaacagggaaacttcaagaacctgagagagtttgtctttaagaacatcgac
ggctattttaagatctatagtaagcatacgcctatcaacctggtaagggatcttccccagggcttttcagccctggaacctttggttgacttgcctat
tggtatcaatatcaccagatttcagacccttctggcattgcatcggtcttatcttactccaggtgattcctcctccgggtggactgccggcgccgctg
cctactatgtcggctatctgcaaccaagaacgttcctgctcaagtacaacgaaaacggcactattacggatgctgttgattgtgccctggaccctc
tgtctgagactaaatgcaccctcaagagctttaccgttgagaaggggatttaccaaaccagtaatttccgggtccaacccaccgaaagcattgtg
cggttcccaaatatcaccaatctgtgtccctttggcgaagtgttcaatgctacaaggtttgcttctgtgtacgcatggaataggaaacgcatctcca
attgtgtcgctgattactccgtgctgtacaattccgcctctttctcaaccttcaagtgttatggcgtttcacctaccaaacttaacgacctgtgcttca
ctaatgtgtatgccgactcttttgtgatacgaggcgatgaagtgagacagattgcaccagggcagaccggcaaaattgccgactacaactacaa
gcttccagatgactttaccggatgtgttattgcatggaactcaaacaatctggattccaaggtgggtggcaactataactacctgtatagactgttc
aggaaatccaacctgaaaccattcgagcgagatataagcacagaaatctaccaggctggaagtacgccctgcaacggcgtggaagggttcaa
ctgctacttcccattgcagagttacggattccagcctacaaacggggtgggttaccaaccctatcgtgtcgtagtcctgagttttgagctcctccat
gccccagccacagtctgtggccccaagaaaagcaccaatctggtgaagaacaaatgcgtgaactttaactttaacggactcacaggaaccggc
gtattgacggagagtaacaagaagttcctgccattccagcagttcggtcgcgatattgccgacactaccgacgctgtccgagatccccagacatt
ggagattcttgatatcacaccctgtagtttcggcggagtgagcgtgattacgcccggaaccaataccagcaatcaggttgccgtcctgtatcagg
acgtgaattgcaccgaggtacctgtcgccatccacgctgaccaacttacacccacatggcgagtatattccaccggctccaacgtctttcagaca
cgtgctggatgtctgatcggtgcagaacacgttaataatagctacgagtgtgatatccccatcggtgctggaatatgcgcctcttatcaaactcaa
accaactctcctagggggcagctagtgtagcatcccaaagtatcattgcctacacaatgagcctcggtgctgagaattctgtcgcctacagcaa
caactccattgctatccctactaacttcacaatcagtgtgacaactgaaattctgcccgtatctatgaccaaaacaagcgttgactgcaccatgta
catctgtggcgattctaccgaatgtagcaatctcctcctgcaatacggatcattctgcactcagctgaatcgtgccctcacaggtattgcagttgag
caggacaagaatacgcaggaagtgtttgcccaggtgaagcaaatctacaaaactccacccataaaagactttggcggattcaatttctcacag
atcctgcccgatccctcaaaaccctccaagcgtagctttatcgaggatctgctcttcaacaaggtaaccctcgcagatgccggtttcatcaagcag
tatggcgattgtctgggagacatcgccgctcgggacctgatctgtgcacagaagttcaatggactgaccgtgctgcctcccttgctgaccgacga
gatgatagcccaatacactagcgccctgctggccggcaccatcacttctgggtggacattcggagctggcgctgcccttcagattccttttgctat
gcagatggcctaccgctttaacggcatcggtgtgacacaaaacgttctgtatgaaaaccagaaactcategccaaccagttcaacagtgctatc
ggtaagatacaggatagcctgtcatccactgccagcgcattgggaaagttgcaggatgtagtgaaccagaatgcccaggcacttaacaccctg
gtgaaacagctctcttcaaattttggtgccatttctagcgtgctgaatgacatactgagccggttggaccctccggaggctgaagtgcagattgat
aggctgataactgggcgccttcagtctcttcagacctatgtgacccagcagctcatccgcgctgctgaaattcgcgcatccgctaacctggcagc
aaccaaaatgtccgagtgtgtgctgggtcagtctaagagagtggacttttgcgggaaggggtatcacctgatgtcttttcctcagtctgcacccca
tggtgtggtctttctgcacgtgacttatgtcccagctcaggaaaagaacttcactacagccccagccatctgccacgatgggaaagcccactttcc
cagggaaggcgtattcgtgtccaatggtactcattggttcgtcactcagagaaatttctacgagccccagattataaccactgacaatacatttgt
atccggcaattgtgatgtggttatcgggattgtgaataatactgtttacgatcctttgcagccagagctggactccttcaaggaggagcttgacaa
atattttaagaatcacacatcacctgacgtcgacctcggagatatttcaggaatcaatgcttccgtggtcaatattcagaaggagatagacaggc
tgaatgaggttgccaagaacctcaacgagtctctgatcgatctgcaggagttgggcaagtacgaacagtatatcaaatggccatggtacatttg
gcttgggttcattgctgggctgatagctatcgtcatggtgacaattatgttgtgttgcatgacatcctgctgtagttgtctgaagggctgctgctcat
gcggcagctgttgctaacatatggaattggcaagctgcttacatagaactcgcggcgattggcatgccgccttaaaatttttattttattttttcttttc
ttttccgaatcggatttgtttttaatatttcaaaaaaaaaaaaaaaaaaaaaaaaaaa
SEQ ID NO: 22, Exemplary SARS-CoV-2 spike protein encoded by SEQ ID NO: 21:
MFVFLVLLPLVSSQCVNLTTRTQLPPAYTNSFTRGVYYPDKVFRSSVLHSTQDLFLPFFSNVTWF
HAIHVSGTNGTKRFDNPVLPFNDGVYFASTEKSNIIRGWIFGTTLDSKTQSLLIVNNATNVVIKVC
EFQFCNDPFLGVYYHKNNKSWMESEFRVYSSANNCTFEYVSQPFLMDLEGKQGNFKNLREFVF
KNIDGYFKIYSKHTPINLVRDLPQGFSALEPLVDLPIGINITRFQTLLALHRSYLTPGDSSSGWTAG
AAAYYVGYLQPRTFLLKYNENGTITDAVDCALDPLSETKCTLKSFTVEKGIYQTSNFRVQPTESI
VRFPNITNLCPFGEVFNATRFASVYAWNRKRISNCVADYSVLYNSASFSTFKCYGVSPTKLNDLC
FTNVYADSFVIRGDEVRQIAPGQTGKIADYNYKLPDDFTGCVIAWNSNNLDSKVGGNYNYLYRL
FRKSNLKPFERDISTEIYQAGSTPCNGVEGFNCYFPLQSYGFQPTNGVGYQPYRVVVLSFELLHAP
ATVCGPKKSTNLVKNKCVNFNFNGLTGTGVLTESNKKFLPFQQFGRDIADTTDAVRDPQTLEILD
ITPCSFGGVSVITPGTNTSNQVAVLYQDVNCTEVPVAIHADQLTPTWRVYSTGSNVFQTRAGCLI
GAEHVNNSYECDIPIGAGICASYQTQTNSPRAAASVASQSIIAYTMSLGAENSVAYSNNSIAIPTNF
TISVTTEILPVSMTKTSVDCTMYICGDSTECSNLLLQYGSFCTQLNRALTGIAVEQDKNTQEVFAQ
VKQIYKTPPIKDFGGFNFSQILPDPSKPSKRSFIEDLLFNKVTLADAGFIKQYGDCLGDIAARDLIC
AQKFNGLTVLPPLLTDEMIAQYTSALLAGTITSGWTFGAGAALQIPFAMQMAYRFNGIGVTQNV
LYENQKLIANQFNSAIGKIQDSLSSTASALGKLQDVVNQNAQALNTLVKQLSSNFGAISSVLNDIL
SRLDPPEAEVQIDRLITGRLQSLQTYVTQQLIRAAEIRASANLAATKMSECVLGQSKRVDFCGKG
YHLMSFPQSAPHGVVFLHVTYVPAQEKNFTTAPAICHDGKAHFPREGVFVSNGTHWFVTQRNF
YEPQIITTDNTFVSGNCDVVIGIVNNTVYDPLQPELDSFKEELDKYFKNHTSPDVDLGDISGINAS
VVNIQKEIDRLNEVAKNLNESLIDLQELGKYEQYIKWPWYIWLGFIAGLIAIVMVTIMLCCMTSC
CSCLKGCCSCGSCC

### Example 30: Expression of a Bioactive GLP-1 Peptide from Self-Amplifying RNA Synthesized with Complete Substitution of 5-Methylcytidine

[0992] This example demonstrates the unexpected finding that self-amplifying RNA encoding a GLP-1 peptide, with complete replacement of cytidine with 5-methylcytidine, allows for expression of the peptide in its bioactive form. Plasmid templates containing the sequence of a self-amplifying RNA encoding the bioactive form of glucagon-like peptide-1 (GLP-1) (amino acids 7-37, HAEGTFTSDVSSYLEGQAAKEFIAWLVRGRG, SEQ ID NO: 17) after an endogenous insulin secretion signal (MALWMRLLPLLALLALWGPDPAAA, SEQ ID NO: 18) and a furin cleavage site (RGRR, SEQ ID NO: 19) were generated by cloning. RNA was synthesized by in vitro transcription using the MEGAscript T7 Transcription kit (Invitrogen™, THERMOFISHER SCIENTIFIC) with 1p g template, co-transcriptional capping using CLEANCAP AU (final conc. 4 mM), and a 3 hour incubation (TRILINK BIOTECHNOLOGIES). The final concentration of all NTPs was 5 mM. To synthesize 5-methylcytidine saRNA, 100% of cytidine was replaced by 5-methylcytidine (5mC saRNA). IVT was followed by a 10 min DNase treatment and 30 min post-transcriptional poly-adenylation using a Poly(A) Tailing Kit (Invitrogen™, THERMOFISHER SCIENTIFIC). The resulting RNA was purified using MEGAclear™ Transcription Clean-up Kit (Invitrogen™ THERMOFISHER SCIENTIFIC) and eluted in DNase/RNase free H₂O prior to storing at −80° C. degrees. The A260 of all modNTPs was empirically determined using a NANODROP2000 (THERMOFISHER SCIENTIFIC). 100,000 HEK293T cells were plated in a 12 well plate overnight in 400 μL of DMEM+10% FBS+1% P/S+50 μM Dipeptidyl peptidase-4 (DPP4) inhibitor. The cells were transfected with 0.5 g of 5-methylcytidine substituted saRNA encoding GLP-1 by MESSENGERMAX transfection (THERMOFISHER SCIENTIFIC). After 24 hours, supernatant was harvested from the cells. To detect the presence of bioactive GLP-1, the Glucagon Like Peptide-1 (Active) ELISA kit (#EGLP-35K, SIGMA-ALDRICH) was utilized following the manufacturer's protocol. Unexpectedly, the cells transfected with 5-methylcytidine modified self-amplifying RNA encoding GLP-1 produced bioactive GLP-1 peptide at a level of 166 pM (see e.g., FIG. 92).

What is claimed herein is:

1. A self-amplifying RNA (saRNA) comprising from 5′ to 3′:
(a) at least one non-structural protein derived from at least one virus;
(b) a subgenomic promoter (SGP) derived from at least one virus; and
(c) at least one cargo of interest;
wherein the saRNA comprises at least 25% modified nucleotides, wherein the modified nucleotides are selected from the group consisting of 5-methylcytidine, 5-methyluridine, 5-hydroxymethyluridine, and 5-hydroxymethylcytidine;
wherein the initiating nucleotide comprises an adenosine or adenosine analog; and
wherein the initiating nucleotide of the saRNA is methylated at the 2′O position of the ribose (Cap1).

2. The saRNA of claim 1, wherein the saRNA expresses the cargo at a level greater than or equal to that of a corresponding saRNA with less than 25% modified nucleotides.

3. The saRNA of claim 1, wherein the level of substitution of the modified nucleotides is 25%-50%; 51%-75%; 75%-99%; or 100%.

4. The saRNA of claim 1, wherein the modified nucleotides comprise 5-methyluridine or 5-hydroxymethyluridine, and one or both of 5-methylcytidine and 5-hydroxymethylcytidine, in the same saRNA molecule.

5. The saRNA of claim 1 comprising from 5′ to 3′:
(a) a 5′ cap;
(b) non-structural protein 1 (nsp1), non-structural protein 2 (nsp2), non-structural protein 3 (nsp3), and/or non-structural protein 4 (nsp4), each derived from at least one virus;
(c) a subgenomic promoter (SGP) derived from at least one virus;
(d) 5′ untranslated region (UTR) derived from at least one virus;
(e) the at least one cargo of interest;
(f) a 3′ untranslated region (UTR) derived from at least one virus; and
(g) a poly-A tail.

6. The saRNA of claim 1, further comprising at least one 5′ conserved sequence element (CSE) and/or 3′ at least one conserved sequence element (CSE) derived from at least one virus.

7. The saRNA of claim 5, wherein the at least one virus is selected from the group consisting of: Venezuela Equine Encephalitis Virus (VEEV), Semliki Forest Virus (SFV), Sindbis Virus (SIN), Chikungunya Virus (CHIKV), Eastern Equine Encephalitis Virus (EEEV), Mayaro Virus (MAYV), Getah Virus (GETV), Ross River Virus (RRV), Una Virus (UNAV), Middleburg Virus (MIDV), O'nyong nyong virus (ONNV), Barmah Forest Virus (BFV), Mucambo Virus (MUCV), Tonate Virus (TONV), Everglades Virus (EVEV), Rio Negro Virus (RNV), Turnip Rosette Virus (TROV), Highlands J Virus (HJV), Western Equine Encephalitis Virus (WEEV), Fig Mosaic Emaravirus (FMV), Aura Virus (AURAV), Kunjin Virus (KUN), Measles virus (MV), Coronavirus (CoV), Rabies virus (RABV), and Vesicular Stomatitis virus (VSV).

8. The saRNA of claim 1, wherein the cargo comprises a chimeric antigen receptor (CAR) comprising an extracellular domain that specifically binds to an antigen of interest.

9. A self-amplifying RNA (saRNA) comprising from 5′ to 3′:
(a) a 5′ cap;
(b) non-structural protein 1 (nsp1), non-structural protein 2 (nsp2), non-structural protein 3 (nsp3), and/or non-structural protein 4 (nsp4), each derived from at least one virus;
(c) a subgenomic promoter (SGP) derived from at least one virus;
(d) a 5′ untranslated region (UTR) derived from at least one virus;
(e) at least one cargo of interest;
(f) a 3′ untranslated region (UTR) derived from at least one virus; and
(g) a poly-A tail;
wherein the cargo comprises a chimeric antigen receptor (CAR) comprising an extracellular domain that specifically binds to an antigen of interest.

10. The saRNA of claim 9, further comprising at least one 5′ conserved sequence element (CSE) and/or at least one 3′ conserved sequence elements (CSE) derived from at least one virus.

11. The saRNA of claim 9, wherein the saRNA does not comprise modified nucleotides.

12. The saRNA of claim 9, wherein the saRNA comprises less than 25% modified nucleotides.

13. The saRNA of claim 9, wherein the CAR is selected from the group consisting of:
(a) a conventional CAR;
(b) an ON-CAR;
(c) an OFF-CAR system;
(d) an ON/OFF-CAR;
(e) an inhibitory CAR; or
(f) a split, universal, programmable and reconfigurable (SUPRA) CAR system.

14. A method of expressing at least one cargo of interest in a cell, the method comprising contacting the cell with the saRNA of claim 1.

15. A method of expressing at least one cargo in a subject in need thereof, the method comprising administering to the subject an effective amount of a pharmaceutical composition comprising the saRNA of claim 1 and a pharmaceutically acceptable carrier.

16. The method of claim 15, wherein the subject is a human, a livestock animal, or a pet.

17. The method of claim 15, wherein the saRNA is a modified saRNA comprising at least 25% modified nucleotides; and wherein:
a) the modified saRNA replicates at a level greater than or equal to that of an equivalent dose of a corresponding saRNA with less than 25% modified nucleotides;
b) the modified saRNA expresses the cargo at a level greater than or equal to that of an equivalent dose of a corresponding saRNA with less than 25% modified nucleotides;
c) the transfection efficiency of the modified saRNA is greater than that of an equivalent dose of a corresponding saRNA with less than 25% modified nucleotides;
d) the modified saRNA produces an early interferon response in the subject, and wherein the early interferon response is decreased compared to an equivalent dose of a corresponding saRNA with less than 25% modified nucleotides; and/or
e) the cargo is expressed at a detectable level from the modified saRNA for an increased time period compared to an equivalent dose of a corresponding saRNA with less than 25% modified nucleotides.

18. The method of claim 15, wherein the subject has cancer or is in need of: vaccination for an infectious disease, protein replacement therapy, antibody therapy, treatment for diabetes and/or obesity, or bispecific T cell engager (BiTE) therapy.

19. The method of claim 15, wherein the saRNA comprises greater than 50% substitution of uridine with 5-methyluridine, and the saRNA has increased kidney specific expression of the cargo compared to an equivalent dose of a corresponding saRNA comprising less than 50% substitution of uridine with 5-methyluridine.

20. The method of claim 15, wherein the saRNA is administered to the subject via intraocular, intraosseous (IO), intraperitoneal (IP), subcutaneous (SC), intravenous (IV), intramuscular (IM), intrarectal, intravaginal, intraarticular (IA), inhalation, or topical administration.

The application's sequence listing, which the Patent Office published only in electronic form, follows.

SEQUENCE LISTING (23 sequences)

SEQ ID NO: 1 - DNA, 19 bp, synthetic construct
  source 1..19: mol_type = other DNA
taatacgactcactataat

SEQ ID NO: 2 - DNA, 7768 bp, synthetic construct
  source 1..7768: mol_type = other DNA
taatacgactcactataatgggcggcgcatgagagaagcccagaccaattacctacccaaaatggagaaagttcacgttgacatcgaggaagacagcccattcctcagagctttgcagcggagcttcccgcagtttgaggtagaagccaagcaggtcactgataatgaccatgctaatgccagagcgttttcgcatctggcttcaaaactgatcgaaacggaggtggacccatccgacacgatccttgacattggaagtgcgcccgcccgcagaatgtattctaagcacaagtatcattgtatctgtccgatgagatgtgcggaagatccggacagattgtataagtatgcaactaagctgaagaaaaactgtaaggaaataactgataaggaattggacaagaaaatgaaggagctggccgccgtcatgagcgaccctgacctggaaactgagactatgtgcctccacgacgacgagtcgtgtcgctacgaagggcaagtcgctgtttaccaggatgtatacgcggttgacggaccgacaagtctctatcaccaagccaataagggagttagagtcgcctactggataggctttgacaccaccccttttatgtttaagaacttggctggagcatatccatcatactctaccaactgggccgacgaaaccgtgttaacggctcgtaacataggcctatgcagctctgacgttatggagcggtcacgtagagggatgtccattcttagaaagaagtatttgaaaccatccaacaatgttctattctctgttggctcgaccatctaccacgagaagagggacttactgaggagctggcacctgccgtctgtatttcacttacgtggcaagcaaaattacacatgtcggtgtgagactatagttagttgcgacgggtacgtcgttaaaagaatagctatcagtccaggcctgtatgggaagccttcaggctatgctgctacgatgcaccgcgagggattcttgtgctgcaaagtgacagacacattgaacggggagagggtctcttttcccgtgtgcacgtatgtgccagctacattgtgtgaccaaatgactggcatactggcaacagatgtcagtgcggacgacgcgcaaaaactgctggttgggctcaaccagcgtatagtcgtcaacggtcgcacccagagaaacaccaataccatgaaaaattaccttttgcccgtagtggcccaggcatttgctaggtgggcaaaggaatataaggaagatcaagaagatgaaaggccactaggactacgagatagacagttagtcatggggtgttgttgggcttttagaaggcacaagataacatctatttataagcgcccggatacccaaaccatcatcaaagtgaacagcgatttccactcattcgtgctgcccaggataggcagtaacacattggagatcgggctgagaacaagaatcaggaaaatgttagaggagcacaaggagccgtcacctctcattaccgccgaggacgtacaagaagctaagtgcgcagccgatgaggctaaggaggtgcgtgaagccgaggagttgcgcgcagctctaccacctttggcagctgatgttgaggagcccactctggaggcagacgtcgacttgatgttacaagaggctggggccggctcagtggagacacctcgtggcttgataaaggttaccagctacgatggcgaggacaagatcggctcttacgctgtgctttctccgcaggctgtactcaagagtgaaaaattatcttgcatccaccctctcgctgaacaagtcatagtgataacacactctggccgaaaagggcgttatgccgtggaaccataccatggtaaagtagtggtgccagagggacatgcaatacccgtccaggactttcaagctctgagtgaaagtgccaccattgtgtacaacgaacgtgagttcgtaaacaggtacctgcaccatattgccacacatggaggagcgctgaacactgatgaagaatattacaaaactgtcaagcccagcgagcacgacggcgaatacctgtacgacatcgacaggaaacagtgcgtcaagaaagaactagtcactgggctagggctcacaggcgagctggtggatcctcccttccatgaattcgcctacgagagtctgagaacacgaccagccgctccttaccaagtaccaaccataggggtgtatggcgtgccaggatcaggcaagtctggcatcattaaaagcgcagtcaccaaaaaagatctagtggtgagcgccaagaaagaaaactgtgcagaaattataagggacgtcaagaaaatgaaagggctggacgtcaatgccagaactgtggactcagtgctcttgaatggatgcaaacaccccgtagagaccctgtatattgacgaagcttttgcttgtcatgcaggtactctcagagcgctcatagccattataagacctaaaaaggcagtgctctgcggggatcccaaacagtgcggtttttttaacatgatgtgcctgaaagtgcattttaaccacgagatttgcacacaagtcttccacaaaagcatctctcgccgttgcactaaatctgtgacttcggtcgtctcaaccttgttttacgacaaaaaaatgagaacgacgaatccgaaagagactaagattgtgattgacactaccggcagtaccaaacctaagcaggacgatctcattctcacttgtttcagagggtgggtgaagcagttgcaaatagattacaaaggcaacgaaataatgacggcagctgcctctcaagggctgacccgtaaaggtgtgtatgccgttcggtacaaggtgaatgaaaatcctctgtacgcacccacctcagaacatgtgaacgtcctactgacccgcacggaggaccgcatcgtgtggaaaacactagccggcgacccatggataaaaacactgactgccaagtaccctgggaatttcactgccacgatagaggagtggcaagcagagcatgatgccatcatgaggcacatcttggagagaccggaccctaccgacgtcttccagaataaggcaaacgtgtgttgggccaaggctttagtgccggtgctgaagaccgctggcatagacatgaccactgaacaatggaacactgtggattattttgaaacggacaaagctcactcagcagagatagtattgaaccaactatgcgtgaggttctttggactcgatctggactccggtctattttctgcacccactgttccgttatccattaggaataatcactgggataactccccgtcgcctaacatgtacgggctgaataaagaagtggtccgtcagctctctcgcaggtacccacaactgcctcgggcagttgccactggaagagtctatgacatgaacactggtacactgcgcaattatgatccgcgcataaacctagtacctgtaaacagaagactgcctcatgctttagtcctccaccataatgaacacccacagagtgacttttcttcattcgtcagcaaattgaagggcagaactgtcctggtggtcggggaaaagttgtccgtcccaggcaaaatggttgactggttgtcagaccggcctgaggctaccttcagagctcggctggatttaggcatcccaggtgatgtgcccaaatatgacataatatttgttaatgtgaggaccccatataaataccatcactatcagcagtgtgaagaccatgccattaagcttagcatgttgaccaagaaagcttgtctgcatctgaatcccggcggaacctgtgtcagcataggttatggttacgctgacagggccagcgaaagcatcattggtgctatagcgcggcagttcaagttttcccgggtatgcaaaccgaaatcctcacttgaagagacggaagttctgtttgtattcattgggtacgatcgcaaggcccgtacgcacaattcttacaagctttcatcaaccttgaccaacatttatacaggttccagactccacgaagccggatgtgcaccctcatatcatgtggtgcgaggggatattgccacggccaccgaaggagtgattataaatgctgctaacagcaaaggacaacctggcggaggggtgtgcggagcgctgtataagaaattcccggaaagcttcgatttacagccgatcgaagtaggaaaagcgcgactggtcaaaggtgcagctaaacatatcattcatgccgtaggaccaaacttcaacaaagtttcggaggttgaaggtgacaaacagttggcagaggcttatgagtccatcgctaagattgtcaacgataacaattacaagtcagtagcgattccactgttgtccaccggcatcttttccgggaacaaagatcgactaacccaatcattgaaccatttgctgacagctttagacaccactgatgcagatgtagccatatactgcagggacaagaaatgggaaatgactctcaaggaagcagtggctaggagagaagcagtggaggagatatgcatatccgacgactcttcagtgacagaacctgatgcagagctggtgagggtgcatccgaagagttctttggctggaaggaagggctacagcacaagcgatggcaaaactttctcatatttggaagggaccaagtttcaccaggcggccaaggatatagcagaaattaatgccatgtggcccgttgcaacggaggccaatgagcaggtatgcatgtatatcctcggagaaagcatgagcagtattaggtcgaaatgccccgtcgaagagtcggaagcctccacaccacctagcacgctgccttgcttgtgcatccatgccatgactccagaaagagtacagcgcctaaaagcctcacgtccagaacaaattactgtgtgctcatcctttccattgccgaagtatagaatcactggtgtgcagaagatccaatgctcccagcctatattgttctcaccgaaagtgcctgcgtatattcatccaaggaagtatctcgtggaaacaccaccggtagacgagactccggagccatcggcagagaaccaatccacagaggggacacctgaacaaccaccacttataaccgaggatgagaccaggactagaacgcctgagccgatcatcatcgaagaggaagaagaggatagcataagtttgctgtcagatggcccgacccaccaggtgctgcaagtcgaggcagacattcacgggccgccctctgtatctagctcatcctggtccattcctcatgcatccgactttgatgtggacagtttatccatacttgacaccctggagggagctagcgtgaccagcggggcaacgtcagccgagactaactcttacttcgcaaagagtatggagtttctggcgcgaccggtgcctgcgcctcgaacagtattcaggaaccctccacatcccgctccgcgcacaagaacaccgtcacttgcacccagcagggcctgctcgagaaccagcctagtttccaccccgccaggcgtgaatagggtgatcactagagaggagctcgaggcgcttaccccgtcacgcactcctagcaggtcggtctcgagaaccagcctggtctccaacccgccaggcgtaaatagggtgattacaagagaggagtttgaggcgttcgtagcacaacaacaatgacggtttgatgcgggtgcatacatcttttcctccgacaccggtcaagggcatttacaacaaaaatcagtaaggcaaacggtgctatccgaagtggtgttggagaggaccgaattggagatttcgtatgccccgcgcctcgaccaagaaaaagaagaattactacgcaagaaattacagttaaatcccacacctgctaacagaagcagataccagtccaggaaggtggagaacatgaaagccataacagctagacgtattctgcaaggcctagggcattatttgaaggcagaaggaaaagtggagtgctaccgaaccctgcatcctgttcctttgtattcatctagtgtgaaccgtgccttttcaagccccaaggtcgcagtggaagcctgtaacgccatgttgaaagagaactttccgactgtggcttcttactgtattattccagagtacgatgcctatttggacatggttgacggagcttcatgctgcttagacactgccagtttttgccctgcaaagctgcgcagctttccaaagaaacactcctatttggaacccacaatacgatcggcagtgccttcagcgatccagaacacgctccagaacgtcctggcagctgccacaaaaagaaattgcaatgtcacgcaaatgagagaattgcccgtattggattcggcggcctttaatgtggaatgcttcaagaaatatgcgtgtaataatgaatattgggaaacgtttaaagaaaaccccatcaggcttactgaagaaaacgtggtaaattacattaccaaattaaaaggaccaaaagctgctgctctttttgcgaagacacataatttgaatatgttgcaggacataccaatggacaggtttgtaatggacttaaagagagacgtgaaagtgactccaggaacaaaacatactgaagaacggcccaaggtacaggtgatccaggctgccgatccgctagcaacagcgtatctgtgcggaatccaccgagagctggttaggagattaaatgcggtcctgcttccgaacattcatacactgtttgatatgtcggctgaagactttgacgctattatagccgagcacttccagcctggggattgtgttctggaaactgacatcgcgtcgtttgataaaagtgaggacgacgccatggctctgaccgcgttaatgattctggaagacttaggtgtggacgcagagctgttgacgctgattgaggcggctttcggcgaaatttcatcaatacatttgcccactaaaactaaatttaaattcggagccatgatgaaatctggaatgttcctcacactgtttgtgaacacagtcattaacattgtaatcgcaagcagagtgttgagagaacggctaaccggatcaccatgtgcagcattcattggagatgacaatatcgtgaaaggagtcaaatcggacaaattaatggcagacaggtgcgccacctggttgaatatggaagtcaagattatagatgctgtggtgggcgagaaagcgccttatttctgtggagggtttattttgtgtgactccgtgaccggcacagcgtgccgtgtggcagaccccctaaaaaggctgtttaagcttggcaaacctctggcagcagacgatgaacatgatgatgacaggagaagggcattgcatgaagagtcaacacgctggaaccgagtgggtattctttcagagctgtgcaaggcagtagaatcaaggtatgaaaccgtaggaacttccatcatagttatggccatgactactctagctagcagtgttaaatcattcagctacctgagaggggcccctataactctctacggctaacctgaatggactacgacatagtctagtccgccaagtctagcaggagagtcccgacctccaggagagaccagggccacccttaagcatatggaattggcaagctgcttacatagaactcgcggcgattggcatgccgccttaaaatttttattttattttttcttttcttttccgaatcggattttgtttttaatatttcaaaaaaaaaaaaaaaaaaaaaaaaaa

SEQ ID NO: 3 - DNA, 17 bp, synthetic construct
  source 1..17: mol_type = other DNA
taatacgactcactata

SEQ ID NO: 4 - protein, 1879 aa, Venezuelan equine encephalitis virus
MEKVHVDIEEDSPFLRALQRSFPQFEVEAKQVTDNDHANARAFSHLASKLIETEVDPSDTILDIGSAPARRMYSKHKYHCICPMRCAEDPDRLYKYATKLKKNCKEITDKELDKKMKELAAVMSDPDLETETMCLHDDESCRYEGQVAVYQDVYAVDGPTSLYHQANKGVRVAYWIGFDTTPFMFKNLAGAYPSYSTNWADETVLTARNIGLCSSDVMERSRRGMSILRKKYLKPSNNVLFSVGSTIYHEKRDLLRSWHLPSVFHLRGKQNYTCRCETIVSCDGYVVKRIAISPGLYGKPSGYAATMHREGFLCCKVTDTLNGERVSFPVCTYVPATLCDQMTGILATDVSADDAQKLLVGLNQRIVVNGRTQRNTNTMKNYLLPVVAQAFARWAKEYKEDQEDERPLGLRDRQLVMGCCWAFRRHKITSIYKRPDTQTIIKVNSDFHSFVLPRIGSNTLEIGLRTRIRKMLEEHKEPSPLITAEDVQEAKCAADEAKEVREAEELRAALPPLAADVEEPTLEADVDLMLQEAGAGSVETPRGLIKVTSYDGEDKIGSYAVLSPQAVLKSEKLSCIHPLAEQVIVITHSGRKGRYAVEPYHGKVVVPEGHAIPVQDFQALSESATIVYNEREFVNRYLHHIATHGGALNTDEEYYKTVKPSEHDGEYLYDIDRKQCVKKELVTGLGLTGELVDPPFHEFAYESLRTRPAAPYQVPTIGVYGVPGSGKSGIIKSAVTKKDLVVSAKKENCAEIIRDVKKMKGLDVNARTVDSVLLNGCKHPVETLYIDEAFACHAGTLRALIAIIRPKKAVLCGDPKQCGFFNMMCLKVHFNHEICTQVFHKSISRRCTKSVTSVVSTLFYDKKMRTTNPKETKIVIDTTGSTKPKQDDLILTCFRGWVKQLQIDYKGNEIMTAAASQGLTRKGVYAVRYKVNENPLYAPTSEHVNVLLTRTEDRIVWKTLAGDPWIKTLTAKYPGNFTATIEEWQAEHDAIMRHILERPDPTDVFQNKANVCWAKALVPVLKTAGIDMTTEQWNTVDYFETDKAHSAEIVLNQLCVRFFGLDLDSGLFSAPTVPLSIRNNHWDNSPSPNMYGLNKEVVRQLSRRYPQLPRAVATGRVYDMNTGTLRNYDPRINLVPVNRRLPHALVLHHNEHPQSDFSSFVSKLKGRTVLVVGEKLSVPGKMVDWLSDRPEATFRARLDLGIPGDVPKYDIIFVNVRTPYKYHHYQQCEDHAIKLSMLTKKACLHLNPGGTCVSIGYGYADRASESIIGAIARQFKFSRVCKPKSSLEETEVLFVFIGYDRKARTHNSYKLSSTLTNIYTGSRLHEAGCAPSYHVVRGDIATATEGVIINAANSKGQPGGGVCGALYKKFPESFDLQPIEVGKARLVKGAAKHIIHAVGPNFNKVSEVEGDKQLAEAYESIAKIVNDNNYKSVAIPLLSTGIFSGNKDRLTQSLNHLLTALDTTDADVAIYCRDKKWEMTLKEAVARREAVEEICISDDSSVTEPDAELVRVHPKSSLAGRKGYSTSDGKTFSYLEGTKFHQAAKDIAEINAMWPVATEANEQVCMYILGESMSSIRSKCPVEESEASTPPSTLPCLCIHAMTPERVQRLKASRPEQITVCSSFPLPKYRITGVQKIQCSQPILFSPKVPAYIHPRKYLVETPPVDETPEPSAENQSTEGTPEQPPLITEDETRTRTPEPIIIEEEEEDSISLLSDGPTHQVLQVEADIHGPPSVSSSSWSIPHASDFDVDSLSILDTLEGASVTSGATSAETNSYFAKSMEFLARPVPAPRTVFRNPPHPAPRTRTPSLAPSRACSRTSLVSTPPGVNRVITREELEALTPSRTPSRSVSRTSLVSNPPGVNRVITREEFEAFVAQQQ

SEQ ID NO: 5 - DNA, 8488 bp, synthetic construct
  source 1..8488: mol_type = other DNA
taatacgactcactataatgggcggcgcatgagagaagcccagaccaattacctacccaaaatggagaaagttcacgttgacatcgaggaagacagcccattcctcagagctttgcagcggagcttcccgcagtttgaggtagaagccaagcaggtcactgataatgaccatgctaatgccagagcgttttcgcatctggcttcaaaactgatcgaaacggaggtggacccatccgacacgatccttgacattggaagtgcgcccgcccgcagaatgtattctaagcacaagtatcattgtatctgtccgatgagatgtgcggaagatccggacagattgtataagtatgcaactaagctgaagaaaaactgtaaggaaataactgataaggaattggacaagaaaatgaaggagctggccgccgtcatgagcgaccctgacctggaaactgagactatgtgcctccacgacgacgagtcgtgtcgctacgaagggcaagtcgctgtttaccaggatgtatacgcggttgacggaccgacaagtctctatcaccaagccaataagggagttagagtcgcctactggataggctttgacaccaccccttttatgtttaagaacttggctggagcatatccatcatactctaccaactgggccgacgaaaccgtgttaacggctcgtaacataggcctatgcagctctgacgttatggagcggtcacgtagagggatgtccattcttagaaagaagtatttgaaaccatccaacaatgttctattctctgttggctcgaccatctaccacgagaagagggacttactgaggagctggcacctgccgtctgtatttcacttacgtggcaagcaaaattacacatgtcggtgtgagactatagttagttgcgacgggtacgtcgttaaaagaatagctatcagtccaggcctgtatgggaagccttcaggctatgctgctacgatgcaccgcgagggattcttgtgctgcaaagtgacagacacattgaacggggagagggtctcttttcccgtgtgcacgtatgtgccagctacattgtgtgaccaaatgactggcatactggcaacagatgtcagtgcggacgacgcgcaaaaactgctggttgggctcaaccagcgtatagtcgtcaacggtcgcacccagagaaacaccaataccatgaaaaattaccttttgcccgtagtggcccaggcatttgctaggtgggcaaaggaatataaggaagatcaagaagatgaaaggccactaggactacgagatagacagttagtcatggggtgttgttgggcttttagaaggcacaagataacatctatttataagcgcccggatacccaaaccatcatcaaagtgaacagcgatttccactcattcgtgctgcccaggataggcagtaacacattggagatcgggctgagaacaagaatcaggaaaatgttagaggagcacaaggagccgtcacctctcattaccgccgaggacgtacaagaagctaagtgcgcagccgatgaggctaaggaggtgcgtgaagccgaggagttgcgcgcagctctaccacctttggcagctgatgttgaggagcccactctggaggcagacgtcgacttgatgttacaagaggctggggccggctcagtggagacacctcgtggcttgataaaggttaccagctacgatggcgaggacaagatcggctcttacgctgtgctttctccgcaggctgtactcaagagtgaaaaattatcttgcatccaccctctcgctgaacaagtcatagtgataacacactctggccgaaaagggcgttatgccgtggaaccataccatggtaaagtagtggtgccagagggacatgcaatacccgtccaggactttcaagctctgagtgaaagtgccaccattgtgtacaacgaacgtgagttcgtaaacaggtacctgcaccatattgccacacatggaggagcgctgaacactgatgaagaatattacaaaactgtcaagcccagcgagcacgacggcgaatacctgtacgacatcgacaggaaacagtgcgtcaagaaagaactagtcactgggctagggctcacaggcgagctggtggatcctcccttccatgaattcgcctacgagagtctgagaacacgaccagccgctccttaccaagtaccaaccataggggtgtatggcgtgccaggatcaggcaagtctggcatcattaaaagcgcagtcaccaaaaaagatctagtggtgagcgccaagaaagaaaactgtgcagaaattataagggacgtcaagaaaatgaaagggctggacgtcaatgccagaactgtggactcagtgctcttgaatggatgcaaacaccccgtagagaccctgtatattgacgaagcttttgcttgtcatgcaggtactctcagagcgctcatagccattataagacctaaaaaggcagtgctctgcggggatcccaaacagtgcggtttttttaacatgatgtgcctgaaagtgcattttaaccacgagatttgcacacaagtcttccacaaaagcatctctcgccgttgcactaaatctgtgacttcggtcgtctcaaccttgttttacgacaaaaaaatgagaacgacgaatccgaaagagactaagattgtgattgacactaccggcagtaccaaacctaagcaggacgatctcattctcacttgtttcagagggtgggtgaagcagttgcaaatagattacaaaggcaacgaaataatgacggcagctgcctctcaagggctgacccgtaaaggtgtgtatgccgttcggtacaaggtgaatgaaaatcctctgtacgcacccacctcagaacatgtgaacgtcctactgacccgcacggaggaccgcatcgtgtggaaaacactagccggcgacccatggataaaaacactgactgccaagtaccctgggaatttcactgccacgatagaggagtggcaagcagagcatgatgccatcatgaggcacatcttggagagaccggaccctaccgacgtcttccagaataaggcaaacgtgtgttgggccaaggctttagtgccggtgctgaagaccgctggcatagacatgaccactgaacaatggaacactgtggattattttgaaacggacaaagctcactcagcagagatagtattgaaccaactatgcgtgaggttctttggactcgatctggactccggtctattttctgcacccactgttccgttatccattaggaataatcactgggataactccccgtcgcctaacatgtacgggctgaataaagaagtggtccgtcagctctctcgcaggtacccacaactgcctcgggcagttgccactggaagagtctatgacatgaacactggtacactgcgcaattatgatccgcgcataaacctagtacctgtaaacagaagactgcctcatgctttagtcctccaccataatgaacacccacagagtgacttttcttcattcgtcagcaaattgaagggcagaactgtcctggtggtcggggaaaagttgtccgtcccaggcaaaatggttgactggttgtcagaccggcctgaggctaccttcagagctcggctggatttaggcatcccaggtgatgtgcccaaatatgacataatatttgttaatgtgaggaccccatataaataccatcactatcagcagtgtgaagaccatgccattaagcttagcatgttgaccaagaaagcttgtctgcatctgaatcccggcggaacctgtgtcagcataggttatggttacgctgacagggccagcgaaagcatcattggtgctatagcgcggcagttcaagttttcccgggtatgcaaaccgaaatcctcacttgaagagacggaagttctgtttgtattcattgggtacgatcgcaaggcccgtacgcacaattcttacaagctttcatcaaccttgaccaacatttatacaggttccagactccacgaagccggatgtgcaccctcatatcatgtggtgcgaggggatattgccacggccaccgaaggagtgattataaatgctgctaacagcaaaggacaacctggcggaggggtgtgcggagcgctgtataagaaattcccggaaagcttcgatttacagccgatcgaagtaggaaaagcgcgactggtcaaaggtgcagctaaacatatcattcatgccgtaggaccaaacttcaacaaagtttcggaggttgaaggtgacaaacagttggcagaggcttatgagtccatcgctaagattgtcaacgataacaattacaagtcagtagcgattccactgttgtccaccggcatcttttccgggaacaaagatcgactaacccaatcattgaaccatttgctgacagctttagacaccactgatgcagatgtagccatatactgcagggacaagaaatgggaaatgactctcaaggaagcagtggctaggagagaagcagtggaggagatatgcatatccgacgactcttcagtgacagaacctgatgcagagctggtgagggtgcatccgaagagttctttggctggaaggaagggctacagcacaagcgatggcaaaactttctcatatttggaagggaccaagtttcaccaggcggccaaggatatagcagaaattaatgccatgtggcccgttgcaacggaggccaatgagcaggtatgcatgtatatcctcggagaaagcatgagcagtattaggtcgaaatgccccgtcgaagagtcggaagcctccacaccacctagcacgctgccttgcttgtgcatccatgccatgactccagaaagagtacagcgcctaaaagcctcacgtccagaacaaattactgtgtgctcatcctttccattgccgaagtatagaatcactggtgtgcagaagatccaatgctcccagcctatattgttctcaccgaaagtgcctgcgtatattcatccaaggaagtatctcgtggaaacaccaccggtagacgagactccggagccatcggcagagaaccaatccacagaggggacacctgaacaaccaccacttataaccgaggatgagaccaggactagaacgcctgagccgatcatcatcgaagaggaagaagaggatagcataagtttgctgtcagatggcccgacccaccaggtgctgcaagtcgaggcagacattcacgggccgccctctgtatctagctcatcctggtccattcctcatgcatccgactttgatgtggacagtttatccatacttgacaccctggagggagctagcgtgaccagcggggcaacgtcagccgagactaactcttacttcgcaaagagtatggagtttctggcgcgaccggtgcctgcgcctcgaacagtattcaggaaccctccacatcccgctccgcgcacaagaacaccgtcacttgcacccagcagggcctgctcgagaaccagcctagtttccaccccgccaggcgtgaatagggtgatcactagagaggagctcgaggcgcttaccccgtcacgcactcctagcaggtcggtctcgagaaccagcctggtctccaacccgccaggcgtaaatagggtgattacaagagaggagtttgaggcgttcgtagcacaacaacaatgacggtttgatgcgggtgcatacatcttttcctccgacaccggtcaagggcatttacaacaaaaatcagtaaggcaaacggtgctatccgaagtggtgttggagaggaccgaattggagatttcgtatgccccgcgcctcgaccaagaaaaagaagaattactacgcaagaaattacagttaaatcccacacctgctaacagaagcagataccagtccaggaaggtggagaacatgaaagccataacagctagacgtattctgcaaggcctagggcattatttgaaggcagaaggaaaagtggagtgctaccgaaccctgcatcctgttcctttgtattcatctagtgtgaaccgtgccttttcaagccccaaggtcgcagtggaagcctgtaacgccatgttgaaagagaactttccgactgtggcttcttactgtattattccagagtacgatgcctatttggacatggttgacggagcttcatgctgcttagacactgccagtttttgccctgcaaagctgcgcagctttccaaagaaacactcctatttggaacccacaatacgatcggcagtgccttcagcgatccagaacacgctccagaacgtcctggcagctgccacaaaaagaaattgcaatgtcacgcaaatgagagaattgcccgtattggattcggcggcctttaatgtggaatgcttcaagaaatatgcgtgtaataatgaatattgggaaacgtttaaagaaaaccccatcaggcttactgaagaaaacgtggtaaattacattaccaaattaaaaggaccaaaagctgctgctctttttgcgaagacacataatttgaatatgttgcaggacataccaatggacaggtttgtaatggacttaaagagagacgtgaaagtgactccaggaacaaaacatactgaagaacggcccaaggtacaggtgatccaggctgccgatccgctagcaacagcgtatctgtgcggaatccaccgagagctggttaggagattaaatgcggtcctgcttccgaacattcatacactgtttgatatgtcggctgaagactttgacgctattatagccgagcacttccagcctggggattgtgttctggaaactgacatcgcgtcgtttgataaaagtgaggacgacgccatggctctgaccgcgttaatgattctggaagacttaggtgtggacgcagagctgttgacgctgattgaggcggctttcggcgaaatttcatcaatacatttgcccactaaaactaaatttaaattcggagccatgatgaaatctggaatgttcctcacactgtttgtgaacacagtcattaacattgtaatcgcaagcagagtgttgagagaacggctaaccggatcaccatgtgcagcattcattggagatgacaatatcgtgaaaggagtcaaatcggacaaattaatggcagacaggtgcgccacctggttgaatatggaagtcaagattatagatgctgtggtgggcgagaaagcgccttatttctgtggagggtttattttgtgtgactccgtgaccggcacagcgtgccgtgtggcagaccccctaaaaaggctgtttaagcttggcaaacctctggcagcagacgatgaacatgatgatgacaggagaagggcattgcatgaagagtcaacacgctggaaccgagtgggtattctttcagagctgtgcaaggcagtagaatcaaggtatgaaaccgtaggaacttccatcatagttatggccatgactactctagctagcagtgttaaatcattcagctacctgagaggggcccctataactctctacggctaacctgaatggactacgacatagtctagtccgccaagtctagcaggagagtcccgacctccaggagagaccagggccacccttaagcttaagatggtgagcaagggcgaggaggataacatggccatcatcaaggagttcatgcgcttcaaggtgcacatggagggctccgtgaacggccacgagttcgagatcgagggcgagggcgagggccgcccctacgagggcacccagaccgccaagctgaaggtgaccaagggtggccccctgcccttcgcctgggacatcctgtcccctcagttcatgtacggctccaaggcctacgtgaagcaccccgccgacatccccgactacttgaagctgtccttccccgagggcttcaagtgggagcgcgtgatgaacttcgaggacggcggcgtggtgaccgtgacccaggactcctccctgcaggacggcgagttcatctacaaggtgaagctgcgcggcaccaacttcccctccgacggccccgtaatgcagaagaagaccatgggctgggaggcctcctccgagcggatgtaccccgaggacggcgccctgaagggcgagatcaagcagaggctgaagctgaaggacggcggccactacgacgctgaggtcaagaccacctacaaggccaagaagcccgtgcagctgcccggcgcctacaacgtcaacatcaagttggacatcacctcccacaacgaggactacaccatcgtggaacagtacgaacgcgccgagggccgccactccaccggcggcatggacgagctgtacaagtaataacatatggaattggcaagctgcttacatagaactcgcggcgattggcatgccgccttaaaatttttattttattttttcttttcttttccgaatcggattttgtttttaatatttcaaaaaaaaaaaaaaaaaaaaaaaaaa

SEQ ID NO: 6 - RNA, 8471 nt, synthetic construct
  source 1..8471: mol_type = other RNA
  misc_difference 6: note = n indicates cytidine, 5-methylcytidine, or 5-hydroxymethylcytidine
  misc_difference 9: note = n indicates cytidine, 5-methylcytidine, or 5-hydroxymethylcytidine
  misc_difference 11: note = n indicates cytidine, 5-methylcytidine, or 5-hydroxymethylcytidine
  misc_difference 22: note = n indicates cytidine, 5-methylcytidine, or 5-hydroxymethylcytidine
  misc_difference 23: note = n indicates cytidine, 5-methylcytidine, or 5-hydroxymethylcytidine
  misc_difference 24: note = n indicates cytidine, 5-methylcytidine, or 5-hydroxymethylcytidine
  misc_difference 28: note = n indicates cytidine, 5-methylcytidine, or 5-hydroxymethylcytidine
  misc_difference 29: note = n indicates cytidine, 5-methylcytidine, or 5-hydroxymethylcytidine
  misc_difference 35: note = n indicates cytidine, 5-methylcytidine, or 5-hydroxymethylcytidine
  misc_difference 36: note = n indicates cytidine, 5-methylcytidine, or 5-hydroxymethylcytidine
  misc_difference 39: note = n indicates cytidine, 5-methylcytidine, or 5-hydroxymethylcytidine
  misc_difference 40: note = n indicates cytidine, 5-methylcytidine, or 5-hydroxymethylcytidine
  misc_difference 41: note = n indicates cytidine, 5-methylcytidine, or 5-hydroxymethylcytidine
  misc_difference 57: note = n indicates cytidine, 5-methylcytidine, or 5-hydroxymethylcytidine
  misc_difference 59: note = n indicates cytidine, 5-methylcytidine, or 5-hydroxymethylcytidine
  misc_difference 65: note = n indicates cytidine, 5-methylcytidine, or 5-hydroxymethylcytidine
  misc_difference 68: note = n indicates cytidine, 5-methylcytidine, or 5-hydroxymethylcytidine
  misc_difference 77: note = n indicates cytidine, 5-methylcytidine, or 5-hydroxymethylcytidine
  misc_difference 80: note = n indicates cytidine, 5-methylcytidine, or 5-hydroxymethylcytidine
  misc_difference 81: note = n indicates cytidine, 5-methylcytidine, or 5-hydroxymethylcytidine
  misc_difference 82: note = n indicates cytidine, 5-methylcytidine, or 5-hydroxymethylcytidine
  misc_difference 86: note = n indicates cytidine, 5-methylcytidine, or 5-hydroxymethylcytidine
  misc_difference 87: note = n indicates cytidine, 5-methylcytidine, or 5-hydroxymethylcytidine
  misc_difference 89: note = n indicates cytidine, 5-methylcytidine, or 5-hydroxymethylcytidine
  misc_difference 94: note = n indicates cytidine, 5-methylcytidine, or 5-hydroxymethylcytidine
  misc_difference 99: note = n indicates cytidine, 5-methylcytidine, or 5-hydroxymethylcytidine
  misc_difference 102: note = n indicates cytidine, 5-methylcytidine, or 5-hydroxymethylcytidine
  misc_difference 107: note = n indicates cytidine, 5-methylcytidine, or 5-hydroxymethylcytidine
  misc_difference 110: note = n indicates cytidine, 5-methylcytidine, or 5-hydroxymethylcytidine
  misc_difference 111: note = n indicates cytidine, 5-methylcytidine, or 5-hydroxymethylcytidine
  misc_difference 112: note = n indicates cytidine, 5-methylcytidine, or 5-hydroxymethylcytidine
  misc_difference 114: note = n indicates cytidine, 5-methylcytidine, or 5-hydroxymethylcytidine
  misc_difference 130: note = n indicates cytidine, 5-methylcytidine, or 5-hydroxymethylcytidine
  misc_difference 131: note = n indicates cytidine, 5-methylcytidine, or 5-hydroxymethylcytidine
  misc_difference 135: note = n indicates cytidine, 5-methylcytidine, or 5-hydroxymethylcytidine
  misc_difference 140: note = n indicates cytidine, 5-methylcytidine, or 5-hydroxymethylcytidine
  misc_difference 142: note = n indicates cytidine, 5-methylcytidine, or 5-hydroxymethylcytidine
  misc_difference 152: note = n indicates cytidine, 5-methylcytidine, or 5-hydroxymethylcytidine
  misc_difference 153: note = n indicates cytidine, 5-methylcytidine, or 5-hydroxymethylcytidine
  misc_difference 157: note = n indicates cytidine, 5-methylcytidine, or 5-hydroxymethylcytidine
  misc_difference 163: note = n indicates cytidine, 5-methylcytidine, or 5-hydroxymethylcytidine
  misc_difference 164: note = n indicates cytidine, 5-methylcytidine, or 5-hydroxymethylcytidine
  misc_difference 169: note = n indicates cytidine, 5-methylcytidine, or 5-hydroxymethylcytidine
  misc_difference 175: note = n indicates cytidine, 5-methylcytidine, or 5-hydroxymethylcytidine
  misc_difference 177: note = n indicates cytidine, 5-methylcytidine, or 5-hydroxymethylcytidine
  misc_difference 180: note = n indicates cytidine, 5-methylcytidine, or 5-hydroxymethylcytidine
  misc_difference 184: note = n indicates cytidine, 5-methylcytidine, or 5-hydroxymethylcytidine
  misc_difference 187: note = n indicates cytidine, 5-methylcytidine, or 5-hydroxymethylcytidine
  misc_difference 192: note = n indicates cytidine, 5-methylcytidine, or 5-hydroxymethylcytidine
  misc_difference 197: note = n indicates cytidine, 5-methylcytidine, or 5-hydroxymethylcytidine
  misc_difference 202: note = n indicates cytidine, 5-methylcytidine, or 5-hydroxymethylcytidine
  misc_difference 212: note = n indicates cytidine, 5-methylcytidine, or 5-hydroxymethylcytidine
  misc_difference 213: note = n indicates cytidine, 5-methylcytidine, or 5-hydroxymethylcytidine
  misc_difference 214: note = n indicates cytidine, 5-methylcytidine, or 5-hydroxymethylcytidine
  misc_difference 217: note = n indicates cytidine, 5-methylcytidine, or 5-hydroxymethylcytidine
  misc_difference 218: note = n indicates cytidine, 5-methylcytidine, or 5-hydroxymethylcytidine
  misc_difference 221: note = n indicates cytidine, 5-methylcytidine, or 5-hydroxymethylcytidine
  misc_difference 223: note = n indicates cytidine, 5-methylcytidine, or 5-hydroxymethylcytidine
  misc_difference 227: note = n indicates cytidine, 5-methylcytidine, or 5-hydroxymethylcytidine
  misc_difference 228: note = n indicates cytidine, 5-methylcytidine, or 5-hydroxymethylcytidine
  misc_difference 233: note = n indicates cytidine, 5-methylcytidine, or 5-hydroxymethylcytidine
  misc_difference 244: note = n indicates cytidine, 5-methylcytidine, or 5-hydroxymethylcytidine
  misc_difference 246: note = n indicates cytidine, 5-methylcytidine, or 5-hydroxymethylcytidine
  misc_difference 247: note = n indicates cytidine, 5-methylcytidine, or 5-hydroxymethylcytidine
  misc_difference 248: note = n indicates cytidine, 5-methylcytidine, or 5-hydroxymethylcytidine
  misc_difference 250: note = n indicates cytidine, 5-methylcytidine, or 5-hydroxymethylcytidine
  misc_difference 251: note = n indicates cytidine, 5-methylcytidine, or 5-hydroxymethylcytidine
  misc_difference 252: note = n indicates cytidine, 5-methylcytidine, or 5-hydroxymethylcytidine
  misc_difference 254: note = n indicates cytidine, 5-methylcytidine, or 5-hydroxymethylcytidine
  misc_difference 265: note = n indicates cytidine, 5-methylcytidine, or 5-hydroxymethylcytidine
  misc_difference 270: note = n indicates cytidine, 5-methylcytidine, or 5-hydroxymethylcytidine
  misc_difference 272: note = n indicates cytidine, 5-methylcytidine, or 5-hydroxymethylcytidine
  misc_difference 279: note = n indicates cytidine, 5-methylcytidine, or 5-hydroxymethylcytidine
  misc_difference 287: note = n indicates cytidine, 5-methylcytidine, or 5-hydroxymethylcytidine
  misc_difference 291: note = n indicates cytidine, 5-methylcytidine, or 5-hydroxymethylcytidine
  misc_difference 292: note = n indicates cytidine, 5-methylcytidine, or 5-hydroxymethylcytidine
  misc_difference 304: note = n indicates cytidine, 5-methylcytidine, or 5-hydroxymethylcytidine
  misc_difference 312: note = n indicates cytidine, 5-methylcytidine, or 5-hydroxymethylcytidine
  misc_difference 313: note = n indicates cytidine, 5-methylcytidine, or 5-hydroxymethylcytidine
  misc_difference 317: note = n indicates cytidine, 5-methylcytidine, or 5-hydroxymethylcytidine
  misc_difference 334: note = n indicates cytidine, 5-methylcytidine, or 5-hydroxymethylcytidine
  misc_difference 337: note = n indicates cytidine, 5-methylcytidine, or 5-hydroxymethylcytidine
  misc_difference 342: note = n indicates cytidine, 5-methylcytidine, or 5-hydroxymethylcytidine
  misc_difference 353: note = n indicates cytidine, 5-methylcytidine, or 5-hydroxymethylcytidine
  misc_difference 367: note = n indicates cytidine, 5-methylcytidine, or 5-hydroxymethylcytidine
  misc_difference 383: note = n indicates cytidine, 5-methylcytidine, or 5-hydroxymethylcytidine
  misc_difference 399: note = n indicates cytidine, 5-methylcytidine, or 5-hydroxymethylcytidine
  misc_difference 403: note = n indicates cytidine, 5-methylcytidine, or 5-hydroxymethylcytidine
  misc_difference 404: note = n indicates cytidine, 5-methylcytidine, or 5-hydroxymethylcytidine
  misc_difference 406: note = n indicates cytidine, 5-methylcytidine, or 5-hydroxymethylcytidine
  misc_difference 407: note = n indicates cytidine, 5-methylcytidine, or 5-hydroxymethylcytidine
  misc_difference 410: note = n indicates cytidine, 5-methylcytidine, or 5-hydroxymethylcytidine
  misc_difference 416: note = n indicates cytidine, 5-methylcytidine, or 5-hydroxymethylcytidine
  misc_difference 419: note = n indicates cytidine, 5-methylcytidine, or 5-hydroxymethylcytidine
  misc_difference 420: note = n indicates cytidine, 5-methylcytidine, or 5-hydroxymethylcytidine
  misc_difference 421: note = n indicates cytidine, 5-methylcytidine, or 5-hydroxymethylcytidine
  misc_difference 425: note = n indicates cytidine, 5-methylcytidine, or 5-hydroxymethylcytidine
  misc_difference 426: note = n indicates cytidine, 5-methylcytidine, or 5-hydroxymethylcytidine
  misc_difference 433: note = n indicates cytidine, 5-methylcytidine, or 5-hydroxymethylcytidine
  misc_difference 439: note = n indicates cytidine, 5-methylcytidine, or 5-hydroxymethylcytidine
  misc_difference 446: note = n indicates cytidine, 5-methylcytidine, or 5-hydroxymethylcytidine
  misc_difference 447: note = n indicates cytidine, 5-methylcytidine, or 5-hydroxymethylcytidine
  misc_difference 449: note = n indicates cytidine, 5-methylcytidine, or 5-hydroxymethylcytidine
  misc_difference 450: note = n indicates cytidine, 5-methylcytidine, or 5-hydroxymethylcytidine
  misc_difference 452: note = n indicates cytidine, 5-methylcytidine, or 5-hydroxymethylcytidine
  misc_difference 455: note = n indicates cytidine, 5-methylcytidine, or 5-hydroxymethylcytidine
  misc_difference 458: note = n indicates cytidine, 5-methylcytidine, or 5-hydroxymethylcytidine
  misc_difference 463: note = n indicates cytidine, 5-methylcytidine, or 5-hydroxymethylcytidine
  misc_difference 468: note = n indicates cytidine, 5-methylcytidine, or 5-hydroxymethylcytidine
  misc_difference 470: note = n indicates cytidine, 5-methylcytidine, or 5-hydroxymethylcytidine
  misc_difference 473: note = n indicates cytidine, 5-methylcytidine, or 5-hydroxymethylcytidine
  misc_difference 480: note = n indicates cytidine, 5-methylcytidine, or 5-hydroxymethylcytidine
  misc_difference 485: note = n indicates cytidine, 5-methylcytidine, or 5-hydroxymethylcytidine
  misc_difference 487: note = n indicates cytidine, 5-methylcytidine, or 5-hydroxymethylcytidine
  misc_difference 494: note = n indicates cytidine, 5-methylcytidine, or 5-hydroxymethylcytidine
  misc_difference 495: note = n indicates cytidine, 5-methylcytidine, or 5-hydroxymethylcytidine
  misc_difference 506: note = n indicates cytidine, 5-methylcytidine, or 5-hydroxymethylcytidine
  misc_difference 508: note = n indicates cytidine, 5-methylcytidine, or 5-hydroxymethylcytidine
  misc_difference 515: note = n indicates cytidine, 5-methylcytidine, or 5-hydroxymethylcytidine
  misc_difference 519: note = n indicates cytidine, 5-methylcytidine, or 5-hydroxymethylcytidine
  misc_difference 520: note = n indicates cytidine, 5-methylcytidine, or 5-hydroxymethylcytidine
  misc_difference 523: note = n indicates cytidine, 5-methylcytidine, or 5-hydroxymethylcytidine
  misc_difference 528: note = n indicates cytidine, 5-methylcytidine, or 5-hydroxymethylcytidine
  misc_difference 530: note = n indicates cytidine, 5-methylcytidine, or 5-hydroxymethylcytidine
  misc_difference 534: note = n indicates cytidine, 5-methylcytidine, or 5-hydroxymethylcytidine
  misc_difference 536: note = n indicates cytidine, 5-methylcytidine, or 5-hydroxymethylcytidine
  misc_difference 537: note = n indicates cytidine, 5-methylcytidine, or 5-hydroxymethylcytidine
  misc_difference 541: note = n indicates cytidine, 5-methylcytidine, or 5-hydroxymethylcytidine
  misc_difference 542: note = n indicates cytidine, 5-methylcytidine, or 5-hydroxymethylcytidine
  misc_difference 560: note = n indicates cytidine, 5-methylcytidine, or 5-hydroxymethylcytidine
  misc_difference 562: note = n indicates cytidine, 5-methylcytidine, or 5-hydroxymethylcytidine
  misc_difference 563: note = n indicates cytidine, 5-methylcytidine, or 5-hydroxymethylcytidine
  misc_difference 566: note = n indicates cytidine, 5-methylcytidine, or 5-hydroxymethylcytidine
  misc_difference 575: note = n indicates cytidine, 5-methylcytidine, or 5-hydroxymethylcytidine
  misc_difference 581: note = n indicates cytidine, 5-methylcytidine, or 5-hydroxymethylcytidine
  misc_difference 583: note = n indicates cytidine, 5-methylcytidine, or 5-hydroxymethylcytidine
  misc_difference 584: note = n indicates cytidine, 5-methylcytidine, or 5-hydroxymethylcytidine
  misc_difference 586: note = n indicates cytidine, 5-methylcytidine, or 5-hydroxymethylcytidine
  misc_difference 587: note = n indicates cytidine, 5-methylcytidine, or 5-hydroxymethylcytidine
  misc_difference 588: note = n indicates cytidine, 5-methylcytidine, or 5-hydroxymethylcytidine
  misc_difference 589: note = n indicates cytidine, 5-methylcytidine, or 5-hydroxymethylcytidine
  misc_difference 605: note = n indicates cytidine, 5-methylcytidine, or 5-hydroxymethylcytidine
  misc_difference 610: note = n indicates cytidine, 5-methylcytidine, or 5-hydroxymethylcytidine
  misc_difference 616: note = n indicates cytidine, 5-methylcytidine, or 5-hydroxymethylcytidine
  misc_difference 621: note = n indicates cytidine, 5-methylcytidine, or 5-hydroxymethylcytidine
  misc_difference 622: note = n indicates cytidine, 5-methylcytidine, or 5-hydroxymethylcytidine
  misc_difference 625: note = n indicates cytidine, 5-methylcytidine, or 5-hydroxymethylcytidine
  misc_difference 629: note = n indicates cytidine, 5-methylcytidine, or 5-hydroxymethylcytidine
  misc_difference 631: note = n indicates cytidine, 5-methylcytidine, or 5-hydroxymethylcytidine
  misc_difference 634: note = n indicates cytidine, 5-methylcytidine, or 5-hydroxymethylcytidine
  misc_difference 635: note = n indicates cytidine, 5-methylcytidine, or 5-hydroxymethylcytidine
  misc_difference 638: note = n indicates cytidine, 5-methylcytidine, or 5-hydroxymethylcytidine
  misc_difference 643: note = n indicates cytidine, 5-methylcytidine, or 5-hydroxymethylcytidine
  misc_difference 644: note = n indicates cytidine, 5-methylcytidine, or 5-hydroxymethylcytidine
  misc_difference 647: note = n indicates cytidine, 5-methylcytidine, or 5-hydroxymethylcytidine
  misc_difference 652: note = n indicates cytidine, 5-methylcytidine, or 5-hydroxymethylcytidine
  misc_difference 653: note = n indicates cytidine, 5-methylcytidine, or 5-hydroxymethylcytidine
  misc_difference 661: note = n indicates cytidine, 5-methylcytidine, or 5-hydroxymethylcytidine
  misc_difference 664: note = n indicates cytidine, 5-methylcytidine, or 5-hydroxymethylcytidine
  misc_difference 666: note = n indicates cytidine, 5-methylcytidine, or 5-hydroxymethylcytidine
  misc_difference 671: note = n indicates cytidine, 5-methylcytidine, or 5-hydroxymethylcytidine
  misc_difference 677: note = n indicates cytidine, 5-methylcytidine, or 5-hydroxymethylcytidine
  misc_difference 678: note = n indicates cytidine, 5-methylcytidine, or 5-hydroxymethylcytidine
  misc_difference 683: note = n indicates cytidine, 5-methylcytidine, or 5-hydroxymethylcytidine
  misc_difference 686: note = n indicates cytidine, 5-methylcytidine, or 5-hydroxymethylcytidine
  misc_difference 688: note = n indicates cytidine, 5-methylcytidine, or 5-hydroxymethylcytidine
  misc_difference 692: note = n indicates cytidine, 5-methylcytidine, or 5-hydroxymethylcytidine
  misc_difference 702: note = n indicates cytidine, 5-methylcytidine, or 5-hydroxymethylcytidine
  misc_difference 706: note = n indicates cytidine, 5-methylcytidine, or 5-hydroxymethylcytidine
  misc_difference 708: note = n indicates cytidine, 5-methylcytidine, or 5-hydroxymethylcytidine
  misc_difference 721: note = n indicates cytidine, 5-methylcytidine, or 5-hydroxymethylcytidine
  misc_difference 722: note = n indicates cytidine, 5-methylcytidine, or 5-hydroxymethylcytidine
  misc_difference 726: note = n indicates cytidine, 5-methylcytidine, or 5-hydroxymethylcytidine
  misc_difference 747: note = n indicates cytidine, 5-methylcytidine, or 5-hydroxymethylcytidine
  misc_difference 748: note = n indicates cytidine, 5-methylcytidine, or 5-hydroxymethylcytidine
  misc_difference 751: note = n indicates cytidine, 5-methylcytidine, or 5-hydroxymethylcytidine
  misc_difference 752: note = n indicates cytidine, 5-methylcytidine, or 5-hydroxymethylcytidine
  misc_difference 755: note = n indicates cytidine, 5-methylcytidine, or 5-hydroxymethylcytidine
  misc_difference 762: note = n indicates cytidine, 5-methylcytidine, or 5-hydroxymethylcytidine
  misc_difference 767: note = n indicates cytidine, 5-methylcytidine, or 5-hydroxymethylcytidine
  misc_difference 769: note = n indicates cytidine, 5-methylcytidine, or 5-hydroxymethylcytidine
  misc_difference 776: note = n indicates cytidine, 5-methylcytidine, or 5-hydroxymethylcytidine
  misc_difference 778: note = n indicates cytidine, 5-methylcytidine, or 5-hydroxymethylcytidine
  misc_difference 781: note = n indicates cytidine, 5-methylcytidine, or 5-hydroxymethylcytidine
  misc_difference 782: note = n indicates cytidine, 5-methylcytidine, or 5-hydroxymethylcytidine
  misc_difference 785: note = n indicates cytidine, 5-methylcytidine, or 5-hydroxymethylcytidine
  misc_difference 788: note = n indicates cytidine, 5-methylcytidine, or 5-hydroxymethylcytidine
  misc_difference 789: note = n indicates cytidine, 5-methylcytidine, or 5-hydroxymethylcytidine
  misc_difference 791: note = n indicates cytidine, 5-methylcytidine, or 5-hydroxymethylcytidine
  misc_difference 803: note = n indicates cytidine, 5-methylcytidine, or 5-hydroxymethylcytidine
  misc_difference 807: note = n indicates cytidine, 5-methylcytidine, or 5-hydroxymethylcytidine
  misc_difference 815: note = n indicates cytidine, 5-methylcytidine, or 5-hydroxymethylcytidine
  misc_difference 819: note = n indicates cytidine, 5-methylcytidine, or 5-hydroxymethylcytidine
  misc_difference 821: note = n indicates cytidine, 5-methylcytidine, or 5-hydroxymethylcytidine
  misc_difference 822: note = n indicates cytidine, 5-methylcytidine, or 5-hydroxymethylcytidine
  misc_difference 825: note = n indicates cytidine, 5-methylcytidine, or 5-hydroxymethylcytidine
  misc_difference 826: note = n indicates cytidine, 5-methylcytidine, or 5-hydroxymethylcytidine
  misc_difference 829: note = n indicates cytidine, 5-methylcytidine, or 5-hydroxymethylcytidine
  misc_difference 837: note = n indicates cytidine, 5-methylcytidine, or 5-hydroxymethylcytidine
  misc_difference 839: note = n indicates cytidine, 5-methylcytidine, or 5-hydroxymethylcytidine
  misc_difference 843: note = n indicates cytidine, 5-methylcytidine, or 5-hydroxymethylcytidine
  misc_difference 848: note = n indicates cytidine, 5-methylcytidine, or 5-hydroxymethylcytidine
  misc_difference 852: note = n indicates cytidine, 5-methylcytidine, or 5-hydroxymethylcytidine
  misc_difference 860: note = n indicates cytidine, 5-methylcytidine, or 5-hydroxymethylcytidine
  misc_difference 862: note = n indicates cytidine, 5-methylcytidine, or 5-hydroxymethylcytidine
  misc_difference 867: note = n indicates cytidine, 5-methylcytidine, or 5-hydroxymethylcytidine
  misc_difference 877: note = n indicates cytidine, 5-methylcytidine, or 5-hydroxymethylcytidine
  misc_difference 890: note = n indicates cytidine, 5-methylcytidine, or 5-hydroxymethylcytidine
  misc_difference 893: note = n indicates cytidine, 5-methylcytidine, or 5-hydroxymethylcytidine
  misc_difference 899: note = n indicates cytidine, 5-methylcytidine, or 5-hydroxymethylcytidine
  misc_difference 902: note = n indicates cytidine, 5-methylcytidine, or 5-hydroxymethylcytidine
  misc_difference 916: note = n indicates cytidine, 5-methylcytidine, or 5-hydroxymethylcytidine
  misc_difference 920: note = n indicates cytidine, 5-methylcytidine, or 5-hydroxymethylcytidine
  misc_difference 924: note = n indicates cytidine, 5-methylcytidine, or 5-hydroxymethylcytidine
  misc_difference 925: note = n indicates cytidine, 5-methylcytidine, or 5-hydroxymethylcytidine
  misc_difference 929: note = n indicates cytidine, 5-methylcytidine, or 5-hydroxymethylcytidine
  misc_difference 930: note = n indicates cytidine, 5-methylcytidine, or 5-hydroxymethylcytidine
  misc_difference 942: note = n indicates cytidine, 5-methylcytidine, or 5-hydroxymethylcytidine
  misc_difference 943: note = n indicates cytidine, 5-methylcytidine, or 5-hydroxymethylcytidine
  misc_difference 946: note = n indicates cytidine, 5-methylcytidine, or 5-hydroxymethylcytidine
  misc_difference 950: note = n indicates cytidine, 5-methylcytidine, or 5-hydroxymethylcytidine
  misc_difference 955: note = n indicates cytidine, 5-methylcytidine, or 5-hydroxymethylcytidine
  misc_difference 958: note = n indicates cytidine, 5-methylcytidine, or 5-hydroxymethylcytidine
  misc_difference 961: note = n indicates cytidine, 5-methylcytidine, or 5-hydroxymethylcytidine
  misc_difference 966: note = n indicates cytidine, 5-methylcytidine, or 5-hydroxymethylcytidine
  misc_difference 968: note = n indicates cytidine, 5-methylcytidine, or 5-hydroxymethylcytidine
  misc_difference 969: note = n indicates cytidine, 5-methylcytidine, or 5-hydroxymethylcytidine
  misc_difference 971: note = n indicates cytidine, 5-methylcytidine, or 5-hydroxymethylcytidine
  misc_difference 980: note = n indicates cytidine, 5-methylcytidine, or 5-hydroxymethylcytidine
  misc_difference 986: note = n indicates cytidine, 5-methylcytidine, or 5-hydroxymethylcytidine
  misc_difference 989: note = n indicates cytidine, 5-methylcytidine, or 5-hydroxymethylcytidine
  misc_difference 997: note = n indicates cytidine, 5-methylcytidine, or 5-hydroxymethylcytidine
  misc_difference 1001: note = n indicates cytidine, 5-methylcytidine, or 5-hydroxymethylcytidine
  misc_difference 1003: note = n indicates cytidine, 5-methylcytidine, or 5-hydroxymethylcytidine
  misc_difference 1010: note = n indicates cytidine, 5-methylcytidine, or 5-hydroxymethylcytidine
  misc_difference 1022: note = n indicates cytidine, 5-methylcytidine, or 5-hydroxymethylcytidine
  misc_difference 1024: note = n indicates cytidine, 5-methylcytidine, or 5-hydroxymethylcytidine
  misc_difference 1029: note = n indicates cytidine, 5-methylcytidine, or 5-hydroxymethylcytidine
  misc_difference 1030: note = n indicates cytidine, 5-methylcytidine, or 5-hydroxymethylcytidine
  misc_difference 1031: note = n indicates cytidine, 5-methylcytidine, or 5-hydroxymethylcytidine
  misc_difference 1037: note = n indicates cytidine, 5-methylcytidine, or 5-hydroxymethylcytidine
  misc_difference 1039: note = n indicates cytidine, 5-methylcytidine, or 5-hydroxymethylcytidine
  misc_difference 1047: note = n indicates cytidine, 5-methylcytidine, or 5-hydroxymethylcytidine
  misc_difference 1048: note = n indicates cytidine, 5-methylcytidine, or 5-hydroxymethylcytidine
  misc_difference 1051: note = n indicates cytidine, 5-methylcytidine, or 5-hydroxymethylcytidine
  misc_difference 1054: note = n indicates cytidine, 5-methylcytidine, or 5-hydroxymethylcytidine
  misc_difference 1064: note = n indicates cytidine, 5-methylcytidine, or 5-hydroxymethylcytidine
  misc_difference 1065: note = n indicates cytidine, 5-methylcytidine, or 5-hydroxymethylcytidine
  misc_difference 1072: note = n indicates cytidine, 5-methylcytidine, or 5-hydroxymethylcytidine
  misc_difference 1076: note = n indicates cytidine, 5-methylcytidine, or 5-hydroxymethylcytidine
  misc_difference 1080: note = n indicates cytidine, 5-methylcytidine, or 5-hydroxymethylcytidine
  misc_difference 1084: note = n indicates cytidine, 5-methylcytidine, or 5-hydroxymethylcytidine
  misc_difference 1087: note = n indicates cytidine, 5-methylcytidine, or 5-hydroxymethylcytidine
  misc_difference 1094: note = n indicates cytidine, 5-methylcytidine, or 5-hydroxymethylcytidine
  misc_difference 1099: note = n indicates cytidine, 5-methylcytidine, or 5-hydroxymethylcytidine
  misc_difference 1103: note = n indicates cytidine, 5-methylcytidine, or 5-hydroxymethylcytidine
  misc_difference 1106: note = n indicates cytidine, 5-methylcytidine, or 5-hydroxymethylcytidine
  misc_difference 1108: note = n indicates cytidine, 5-methylcytidine, or 5-hydroxymethylcytidine
  misc_difference 1110: note = n indicates cytidine, 5-methylcytidine, or 5-hydroxymethylcytidine
  misc_difference 1116: note = n indicates cytidine, 5-methylcytidine, or 5-hydroxymethylcytidine
  misc_difference 1119: note = n indicates cytidine, 5-methylcytidine, or 5-hydroxymethylcytidine
  misc_difference 1128: note = n indicates cytidine, 5-methylcytidine, or 5-hydroxymethylcytidine
  misc_difference 1130: note = n indicates cytidine, 5-methylcytidine, or 5-hydroxymethylcytidine
  misc_difference 1133: note = n indicates cytidine, 5-methylcytidine, or 5-hydroxymethylcytidine
  misc_difference 1134: note = n indicates cytidine, 5-methylcytidine, or 5-hydroxymethylcytidine
  misc_difference 1137: note = n indicates cytidine, 5-methylcytidine, or 5-hydroxymethylcytidine
  misc_difference 1145: note = n indicates cytidine, 5-methylcytidine, or 5-hydroxymethylcytidine
  misc_difference 1148: note = n indicates cytidine, 5-methylcytidine, or 5-hydroxymethylcytidine
  misc_difference 1151: note = n indicates cytidine, 5-methylcytidine, or 5-hydroxymethylcytidine
  misc_difference 1155: note = n indicates cytidine, 5-methylcytidine, or 5-hydroxymethylcytidine
  misc_difference 1157: note = n indicates cytidine, 5-methylcytidine, or 5-hydroxymethylcytidine
  misc_difference 1159: note = n indicates cytidine, 5-methylcytidine, or 5-hydroxymethylcytidine
  misc_difference 1160: note = n indicates cytidine, 5-methylcytidine, or 5-hydroxymethylcytidine
  misc_difference 1161: note = n indicates cytidine, 5-methylcytidine, or 5-hydroxymethylcytidine
  misc_difference 1169: note = n indicates cytidine, 5-methylcytidine, or 5-hydroxymethylcytidine
  misc_difference 1171: note = n indicates cytidine, 5-methylcytidine, or 5-hydroxymethylcytidine
  misc_difference 1172: note = n indicates cytidine, 5-methylcytidine, or 5-hydroxymethylcytidine
  misc_difference 1177: note = n indicates cytidine, 5-methylcytidine, or 5-hydroxymethylcytidine
  misc_difference 1178: note = n indicates cytidine, 5-methylcytidine, or 5-hydroxymethylcytidine
  misc_difference 1190: note = n indicates cytidine, 5-methylcytidine, or 5-hydroxymethylcytidine
  misc_difference 1191: note = n indicates cytidine, 5-methylcytidine, or 5-hydroxymethylcytidine
  misc_difference 1197: note = n indicates cytidine, 5-methylcytidine, or 5-hydroxymethylcytidine
  misc_difference 1198: note = n indicates cytidine, 5-methylcytidine, or 5-hydroxymethylcytidine
  misc_difference 1199: note = n indicates cytidine, 5-methylcytidine, or 5-hydroxymethylcytidine
  misc_difference 1207: note = n indicates cytidine, 5-methylcytidine, or 5-hydroxymethylcytidine
  misc_difference 1208: note = n indicates cytidine, 5-methylcytidine, or 5-hydroxymethylcytidine
  misc_difference 1209: note = n indicates cytidine, 5-methylcytidine, or 5-hydroxymethylcytidine
  misc_difference 1213: note = n indicates cytidine, 5-methylcytidine, or 5-hydroxymethylcytidine
  misc_difference 1219: note = n indicates cytidine, 5-methylcytidine, or 5-hydroxymethylcytidine
  misc_difference 1228: note = n indicates cytidine, 5-methylcytidine, or 5-hydroxymethylcytidine
  misc_difference 1248: note = n indicates cytidine, 5-methylcytidine, or 5-hydroxymethylcytidine
  misc_difference 1263: note = n indicates cytidine, 5-methylcytidine, or 5-hydroxymethylcytidine
  misc_difference 1264: note = n indicates cytidine, 5-methylcytidine, or 5-hydroxymethylcytidine
  misc_difference 1266: note = n indicates cytidine, 5-methylcytidine, or 5-hydroxymethylcytidine
  misc_difference 1272: note = n indicates cytidine, 5-methylcytidine, or 5-hydroxymethylcytidine
  misc_difference 1275: note = n indicates cytidine, 5-methylcytidine, or 5-hydroxymethylcytidine
  misc_difference 1284: note = n indicates cytidine, 5-methylcytidine, or 5-hydroxymethylcytidine
  misc_difference 1292: note = n indicates cytidine, 5-methylcytidine, or 5-hydroxymethylcytidine
  misc_difference 1309: note = n indicates cytidine, 5-methylcytidine, or 5-hydroxymethylcytidine
  misc_difference 1320: note = n indicates cytidine, 5-methylcytidine, or 5-hydroxymethylcytidine
  misc_difference 1322: note = n indicates cytidine, 5-methylcytidine, or 5-hydroxymethylcytidine
  misc_difference 1330: note = n indicates cytidine, 5-methylcytidine, or 5-hydroxymethylcytidine
  misc_difference 1333: note = n indicates cytidine, 5-methylcytidine, or 5-hydroxymethylcytidine
  misc_difference 1344: note = n indicates cytidine, 5-methylcytidine, or 5-hydroxymethylcytidine
  misc_difference 1346: note = n indicates cytidine, 5-methylcytidine, or 5-hydroxymethylcytidine
  misc_difference 1347: note = n indicates cytidine, 5-methylcytidine, or 5-hydroxymethylcytidine
  misc_difference 1348: note = n indicates cytidine, 5-methylcytidine, or 5-hydroxymethylcytidine
  misc_difference 1354: note = n indicates cytidine, 5-methylcytidine, or 5-hydroxymethylcytidine
  misc_difference 1355: note = n indicates cytidine, 5-methylcytidine, or 5-hydroxymethylcytidine
  misc_difference 1356: note = n indicates cytidine, 5-methylcytidine, or 5-hydroxymethylcytidine
  misc_difference 1360: note = n indicates cytidine, 5-methylcytidine, or 5-hydroxymethylcytidine
  misc_difference 1361: note = n indicates cytidine, 5-methylcytidine, or 5-hydroxymethylcytidine
  misc_difference 1364: note = n indicates cytidine, 5-methylcytidine, or 5-hydroxymethylcytidine
  misc_difference 1367: note = n indicates cytidine, 5-methylcytidine, or 5-hydroxymethylcytidine
  misc_difference 1376: note = n indicates cytidine, 5-methylcytidine, or 5-hydroxymethylcytidine
  misc_difference 1379: note = n indicates cytidine, 5-methylcytidine, or 5-hydroxymethylcytidine
  misc_difference 1385: note = n indicates cytidine, 5-methylcytidine, or 5-hydroxymethylcytidine
  misc_difference 1386: note = n indicates cytidine, 5-methylcytidine, or 5-hydroxymethylcytidine
  misc_difference 1388: note = n indicates cytidine, 5-methylcytidine, or 5-hydroxymethylcytidine
  misc_difference 1390: note = n indicates cytidine, 5-methylcytidine, or 5-hydroxymethylcytidine
  misc_difference 1394: note = n indicates cytidine, 5-methylcytidine, or 5-hydroxymethylcytidine
  misc_difference 1398: note = n indicates cytidine, 5-methylcytidine, or 5-hydroxymethylcytidine
  misc_difference 1401: note = n indicates cytidine, 5-methylcytidine, or 5-hydroxymethylcytidine
  misc_difference 1402: note = n indicates cytidine, 5-methylcytidine, or 5-hydroxymethylcytidine
  misc_difference 1403: note = n indicates cytidine, 5-methylcytidine, or 5-hydroxymethylcytidine
  misc_difference 1412: note = n indicates cytidine, 5-methylcytidine, or 5-hydroxymethylcytidine
  misc_difference 1418: note = n indicates cytidine, 5-methylcytidine, or 5-hydroxymethylcytidine
  misc_difference 1420: note = n indicates cytidine, 5-methylcytidine, or 5-hydroxymethylcytidine
  misc_difference 1430: note = n indicates cytidine, 5-methylcytidine, or 5-hydroxymethylcytidine
  misc_difference 1434: note = n indicates cytidine, 5-methylcytidine, or 5-hydroxymethylcytidine
  misc_difference 1441: note = n indicates cytidine, 5-methylcytidine, or 5-hydroxymethylcytidine
  misc_difference 1448: note = n indicates cytidine, 5-methylcytidine, or 5-hydroxymethylcytidine
  misc_difference 1467: note = n indicates cytidine, 5-methylcytidine, or 5-hydroxymethylcytidine
  misc_difference 1469: note = n indicates cytidine, 5-methylcytidine, or 5-hydroxymethylcytidine
  misc_difference 1476: note = n indicates cytidine, 5-methylcytidine, or 5-hydroxymethylcytidine
  misc_difference 1477: note = n indicates cytidine, 5-methylcytidine, or 5-hydroxymethylcytidine
  misc_difference 1480: note = n indicates cytidine, 5-methylcytidine, or 5-hydroxymethylcytidine
  misc_difference 1482: note = n indicates cytidine, 5-methylcytidine, or 5-hydroxymethylcytidine
  misc_difference 1483: note = n indicates cytidine, 5-methylcytidine, or 5-hydroxymethylcytidine
  misc_difference 1485: note = n indicates cytidine, 5-methylcytidine, or 5-hydroxymethylcytidine
  misc_difference 1487: note = n indicates cytidine, 5-methylcytidine, or 5-hydroxymethylcytidine
  misc_difference 1492: note = n indicates cytidine, 5-methylcytidine, or 5-hydroxymethylcytidine
  misc_difference 1493: note = n indicates cytidine, 5-methylcytidine, or 5-hydroxymethylcytidine
  misc_difference 1495: note = n indicates cytidine, 5-methylcytidine, or 5-hydroxymethylcytidine
  misc_difference 1496: note = n indicates cytidine, 5-methylcytidine, or 5-hydroxymethylcytidine
  misc_difference 1502: note = n indicates cytidine, 5-methylcytidine, or 5-hydroxymethylcytidine
  misc_difference 1506: note = n indicates cytidine, 5-methylcytidine, or 5-hydroxymethylcytidine
  misc_difference 1513: note = n indicates cytidine, 5-methylcytidine, or 5-hydroxymethylcytidine
  misc_difference 1520: note = n indicates cytidine, 5-methylcytidine, or 5-hydroxymethylcytidine
  misc_difference 1522: note = n indicates cytidine, 5-methylcytidine, or 5-hydroxymethylcytidine
  misc_difference 1525: note = n indicates cytidine, 5-methylcytidine, or 5-hydroxymethylcytidine
  misc_difference 1526: note = n indicates cytidine, 5-methylcytidine, or 5-hydroxymethylcytidine
  misc_difference 1534: note = n indicates cytidine, 5-methylcytidine, or 5-hydroxymethylcytidine
  misc_difference 1545: note = n indicates cytidine, 5-methylcytidine, or 5-hydroxymethylcytidine
  misc_difference 1552: note = n indicates cytidine, 5-methylcytidine, or 5-hydroxymethylcytidine
  misc_difference 1553: note = n indicates cytidine, 5-methylcytidine, or 5-hydroxymethylcytidine
  misc_difference 1563: note = n indicates cytidine, 5-methylcytidine, or 5-hydroxymethylcytidine
  misc_difference 1565: note = n indicates cytidine, 5-methylcytidine, or 5-hydroxymethylcytidine
  misc_difference 1567: note = n indicates cytidine, 5-methylcytidine, or 5-hydroxymethylcytidine
  misc_difference 1570: note = n indicates cytidine, 5-methylcytidine, or 5-hydroxymethylcytidine
  misc_difference 1572: note = n indicates cytidine, 5-methylcytidine, or 5-hydroxymethylcytidine
  misc_difference 1575: note = n indicates cytidine, 5-methylcytidine, or 5-hydroxymethylcytidine
  misc_difference 1576: note = n indicates cytidine, 5-methylcytidine, or 5-hydroxymethylcytidine
  misc_difference 1578: note = n indicates cytidine, 5-methylcytidine, or 5-hydroxymethylcytidine
  misc_difference 1579: note = n indicates cytidine, 5-methylcytidine, or 5-hydroxymethylcytidine
  misc_difference 1585: note = n indicates cytidine, 5-methylcytidine, or 5-hydroxymethylcytidine
  misc_difference 1588: note = n indicates cytidine, 5-methylcytidine, or 5-hydroxymethylcytidine
  misc_difference 1602: note = n indicates cytidine, 5-methylcytidine, or 5-hydroxymethylcytidine
  misc_difference 1603: note = n indicates cytidine, 5-methylcytidine, or 5-hydroxymethylcytidine
  misc_difference 1604: note = n indicates cytidine, 5-methylcytidine, or 5-hydroxymethylcytidine
  misc_difference 1606: note = n indicates cytidine, 5-methylcytidine, or 5-hydroxymethylcytidine
  misc_difference 1608: note = n indicates cytidine, 5-methylcytidine, or 5-hydroxymethylcytidine
  misc_difference 1615: note = n indicates cytidine, 5-methylcytidine, or 5-hydroxymethylcytidine
  misc_difference 1619: note = n indicates cytidine, 5-methylcytidine, or 5-hydroxymethylcytidine
  misc_difference 1622: note = n indicates cytidine, 5-methylcytidine, or 5-hydroxymethylcytidine
  misc_difference 1625: note = n indicates cytidine, 5-methylcytidine, or 5-hydroxymethylcytidine
  misc_difference 1635: note = n indicates cytidine, 5-methylcytidine, or 5-hydroxymethylcytidine
  misc_difference 1642: note = n indicates cytidine, 5-methylcytidine, or 5-hydroxymethylcytidine
  misc_difference 1648: note = n indicates cytidine, 5-methylcytidine, or 5-hydroxymethylcytidine
  misc_difference 1649: note = n indicates cytidine, 5-methylcytidine, or 5-hydroxymethylcytidine
  misc_difference 1652: note = n indicates cytidine, 5-methylcytidine, or 5-hydroxymethylcytidine
  misc_difference 1654: note = n indicates cytidine, 5-methylcytidine, or 5-hydroxymethylcytidine
  misc_difference 1663: note = n indicates cytidine, 5-methylcytidine, or 5-hydroxymethylcytidine
  misc_difference 1665: note = n indicates cytidine, 5-methylcytidine, or 5-hydroxymethylcytidine
  misc_difference 1666: note = n indicates cytidine, 5-methylcytidine, or 5-hydroxymethylcytidine
  misc_difference 1668: note = n indicates cytidine, 5-methylcytidine, or 5-hydroxymethylcytidine
  misc_difference 1673: note = n indicates cytidine, 5-methylcytidine, or 5-hydroxymethylcytidine
  misc_difference 1687: note = n indicates cytidine, 5-methylcytidine, or 5-hydroxymethylcytidine
  misc_difference 1688: note = n indicates cytidine, 5-methylcytidine, or 5-hydroxymethylcytidine
  misc_difference 1691: note = n indicates cytidine, 5-methylcytidine, or 5-hydroxymethylcytidine
  misc_difference 1694: note = n indicates cytidine, 5-methylcytidine, or 5-hydroxymethylcytidine
  misc_difference 1700: note = n indicates cytidine, 5-methylcytidine, or 5-hydroxymethylcytidine
  misc_difference 1706: note = n indicates cytidine, 5-methylcytidine, or 5-hydroxymethylcytidine
  misc_difference 1712: note = n indicates cytidine, 5-methylcytidine, or 5-hydroxymethylcytidine
  misc_difference 1715: note = n indicates cytidine, 5-methylcytidine, or 5-hydroxymethylcytidine
  misc_difference 1717: note = n indicates cytidine, 5-methylcytidine, or 5-hydroxymethylcytidine
  misc_difference 1721: note = n indicates cytidine, 5-methylcytidine, or 5-hydroxymethylcytidine
  misc_difference 1723: note = n indicates cytidine, 5-methylcytidine, or 5-hydroxymethylcytidine
  misc_difference 1728: note = n indicates cytidine, 5-methylcytidine, or 5-hydroxymethylcytidine
  misc_difference 1732: note = n indicates cytidine, 5-methylcytidine, or 5-hydroxymethylcytidine
  misc_difference 1734: note = n indicates cytidine, 5-methylcytidine, or 5-hydroxymethylcytidine
  misc_difference 1735: note = n indicates cytidine, 5-methylcytidine, or 5-hydroxymethylcytidine
  misc_difference 1737: note = n indicates cytidine, 5-methylcytidine, or 5-hydroxymethylcytidine
  misc_difference 1741: note = n indicates cytidine, 5-methylcytidine, or 5-hydroxymethylcytidine
  misc_difference 1746: note = n indicates cytidine, 5-methylcytidine, or 5-hydroxymethylcytidine
  misc_difference 1748: note = n indicates cytidine, 5-methylcytidine, or 5-hydroxymethylcytidine
  misc_difference 1765: note = n indicates cytidine, 5-methylcytidine, or 5-hydroxymethylcytidine
  misc_difference 1769: note = n indicates cytidine, 5-methylcytidine, or 5-hydroxymethylcytidine
  misc_difference 1772: note = n indicates cytidine, 5-methylcytidine, or 5-hydroxymethylcytidine
  misc_difference 1773: note = n indicates cytidine, 5-methylcytidine, or 5-hydroxymethylcytidine
  misc_difference 1775: note = n indicates cytidine, 5-methylcytidine, or 5-hydroxymethylcytidine
  misc_difference 1776: note = n indicates cytidine, 5-methylcytidine, or 5-hydroxymethylcytidine
  misc_difference 1777: note = n indicates cytidine, 5-methylcytidine, or 5-hydroxymethylcytidine
  misc_difference 1779: note = n indicates cytidine, 5-methylcytidine, or 5-hydroxymethylcytidine
  misc_difference 1781: note = n indicates cytidine, 5-methylcytidine, or 5-hydroxymethylcytidine
  misc_difference 1783: note = n indicates cytidine, 5-methylcytidine, or 5-hydroxymethylcytidine
  misc_difference 1788: note = n indicates cytidine, 5-methylcytidine, or 5-hydroxymethylcytidine
  misc_difference 1793: note = n indicates cytidine, 5-methylcytidine, or 5-hydroxymethylcytidine
  misc_difference 1804: note = n indicates cytidine, 5-methylcytidine, or 5-hydroxymethylcytidine
  misc_difference 1806: note = n indicates cytidine, 5-methylcytidine, or 5-hydroxymethylcytidine
  misc_difference 1808: note = n indicates cytidine, 5-methylcytidine, or 5-hydroxymethylcytidine
  misc_difference 1810: note = n indicates cytidine, 5-methylcytidine, or 5-hydroxymethylcytidine
  misc_difference 1814: note = n indicates cytidine, 5-methylcytidine, or 5-hydroxymethylcytidine
  misc_difference 1815: note = n indicates cytidine, 5-methylcytidine, or 5-hydroxymethylcytidine
  misc_difference 1824: note = n indicates cytidine, 5-methylcytidine, or 5-hydroxymethylcytidine
  misc_difference 1831: note = n indicates cytidine, 5-methylcytidine, or 5-hydroxymethylcytidine
  misc_difference 1832: note = n indicates cytidine, 5-methylcytidine, or 5-hydroxymethylcytidine
  misc_difference 1839: note = n indicates cytidine, 5-methylcytidine, or 5-hydroxymethylcytidine
  misc_difference 1840: note = n indicates cytidine, 5-methylcytidine, or 5-hydroxymethylcytidine
  misc_difference 1844: note = n indicates cytidine, 5-methylcytidine, or 5-hydroxymethylcytidine
  misc_difference 1845: note = n indicates cytidine, 5-methylcytidine, or 5-hydroxymethylcytidine
  misc_difference 1863: note = n indicates cytidine, 5-methylcytidine, or 5-hydroxymethylcytidine
  misc_difference 1864: note = n indicates cytidine, 5-methylcytidine, or 5-hydroxymethylcytidine
  misc_difference 1872: note = n indicates cytidine, 5-methylcytidine, or 5-hydroxymethylcytidine
  misc_difference 1876: note = n indicates cytidine, 5-methylcytidine, or 5-hydroxymethylcytidine
  misc_difference 1881: note = n indicates cytidine, 5-methylcytidine, or 5-hydroxymethylcytidine
  misc_difference 1882: note = n indicates cytidine, 5-methylcytidine, or 5-hydroxymethylcytidine
  misc_difference 1883: note = n indicates cytidine, 5-methylcytidine, or 5-hydroxymethylcytidine
  misc_difference 1886: note = n indicates cytidine, 5-methylcytidine, or 5-hydroxymethylcytidine
  misc_difference 1887: note = n indicates cytidine, 5-methylcytidine, or 5-hydroxymethylcytidine
  misc_difference 1892: note = n indicates cytidine, 5-methylcytidine, or 5-hydroxymethylcytidine
  misc_difference 1896: note = n indicates cytidine, 5-methylcytidine, or 5-hydroxymethylcytidine
  misc_difference 1900: note = n indicates cytidine, 5-methylcytidine, or 5-hydroxymethylcytidine
  misc_difference 1902: note = n indicates cytidine, 5-methylcytidine, or 5-hydroxymethylcytidine
  misc_difference 1915: note = n indicates cytidine, 5-methylcytidine, or 5-hydroxymethylcytidine
  misc_difference 1916: note = n indicates cytidine, 5-methylcytidine, or 5-hydroxymethylcytidine
  misc_difference 1918: note = n indicates cytidine, 5-methylcytidine, or 5-hydroxymethylcytidine
  misc_difference 1919: note = n indicates cytidine, 5-methylcytidine, or 5-hydroxymethylcytidine
  misc_difference 1928: note = n indicates cytidine, 5-methylcytidine, or 5-hydroxymethylcytidine
  misc_difference 1931: note = n indicates cytidine, 5-methylcytidine, or 5-hydroxymethylcytidine
  misc_difference 1935: note = n indicates cytidine, 5-methylcytidine, or 5-hydroxymethylcytidine
  misc_difference 1943: note = n indicates cytidine, 5-methylcytidine, or 5-hydroxymethylcytidine
  misc_difference 1949: note = n indicates cytidine, 5-methylcytidine, or 5-hydroxymethylcytidine
  misc_difference 1955: note = n indicates cytidine, 5-methylcytidine, or 5-hydroxymethylcytidine
  misc_difference 1956: note = n indicates cytidine, 5-methylcytidine, or 5-hydroxymethylcytidine
  misc_difference 1959: note = n indicates cytidine, 5-methylcytidine, or 5-hydroxymethylcytidine
  misc_difference 1961: note = n indicates cytidine, 5-methylcytidine, or 5-hydroxymethylcytidine
  misc_difference 1962: note = n indicates cytidine, 5-methylcytidine, or 5-hydroxymethylcytidine
  misc_difference 1969: note = n indicates cytidine, 5-methylcytidine, or 5-hydroxymethylcytidine
  misc_difference 1970: note = n indicates cytidine, 5-methylcytidine, or 5-hydroxymethylcytidine
  misc_difference 1972: note = n indicates cytidine, 5-methylcytidine, or 5-hydroxymethylcytidine
  misc_difference 1974: note = n indicates cytidine, 5-methylcytidine, or 5-hydroxymethylcytidine
  misc_difference 1984: note = n indicates cytidine, 5-methylcytidine, or 5-hydroxymethylcytidine
  misc_difference 1986: note = n indicates cytidine, 5-methylcytidine, or 5-hydroxymethylcytidine
  misc_difference 1991: note = n indicates cytidine, 5-methylcytidine, or 5-hydroxymethylcytidine
  misc_difference 1993: note = n indicates cytidine, 5-methylcytidine, or 5-hydroxymethylcytidine
  misc_difference 2009: note = n indicates cytidine, 5-methylcytidine, or 5-hydroxymethylcytidine
  misc_difference 2014: note = n indicates cytidine, 5-methylcytidine, or 5-hydroxymethylcytidine
  misc_difference 2018: note = n indicates cytidine, 5-methylcytidine, or 5-hydroxymethylcytidine
  misc_difference 2022: note = n indicates cytidine, 5-methylcytidine, or 5-hydroxymethylcytidine
  misc_difference 2023: note = n indicates cytidine, 5-methylcytidine, or 5-hydroxymethylcytidine
  misc_difference 2024: note = n indicates cytidine, 5-methylcytidine, or 5-hydroxymethylcytidine
  misc_difference 2027: note = n indicates cytidine, 5-methylcytidine, or 5-hydroxymethylcytidine
  misc_difference 2031: note = n indicates cytidine, 5-methylcytidine, or 5-hydroxymethylcytidine
  misc_difference 2033: note = n indicates cytidine, 5-methylcytidine, or 5-hydroxymethylcytidine
  misc_difference 2036: note = n indicates cytidine, 5-methylcytidine, or 5-hydroxymethylcytidine
  misc_difference 2039: note = n indicates cytidine, 5-methylcytidine, or 5-hydroxymethylcytidine
  misc_difference 2045: note = n indicates cytidine, 5-methylcytidine, or 5-hydroxymethylcytidine
  misc_difference 2046: note = n indicates cytidine, 5-methylcytidine, or 5-hydroxymethylcytidine
  misc_difference 2051: note = n indicates cytidine, 5-methylcytidine, or 5-hydroxymethylcytidine
  misc_difference 2054: note = n indicates cytidine, 5-methylcytidine, or 5-hydroxymethylcytidine
  misc_difference 2057: note = n indicates cytidine, 5-methylcytidine, or 5-hydroxymethylcytidine
  misc_difference 2060: note = n indicates cytidine, 5-methylcytidine, or 5-hydroxymethylcytidine
  misc_difference 2067: note = n indicates cytidine, 5-methylcytidine, or 5-hydroxymethylcytidine
  misc_difference 2072: note = n indicates cytidine, 5-methylcytidine, or 5-hydroxymethylcytidine
  misc_difference 2075: note = n indicates cytidine, 5-methylcytidine, or 5-hydroxymethylcytidine
  misc_difference 2085: note = n indicates cytidine, 5-methylcytidine, or 5-hydroxymethylcytidine
  misc_difference 2090: note = n indicates cytidine, 5-methylcytidine, or 5-hydroxymethylcytidine
  misc_difference 2092: note = n indicates cytidine, 5-methylcytidine, or 5-hydroxymethylcytidine
  misc_difference 2097: note = n indicates cytidine, 5-methylcytidine, or 5-hydroxymethylcytidine
  misc_difference 2103: note = n indicates cytidine, 5-methylcytidine, or 5-hydroxymethylcytidine
  misc_difference 2105: note = n indicates cytidine, 5-methylcytidine, or 5-hydroxymethylcytidine
  misc_difference 2107: note = n indicates cytidine, 5-methylcytidine, or 5-hydroxymethylcytidine
  misc_difference 2111: note = n indicates cytidine, 5-methylcytidine, or 5-hydroxymethylcytidine
  misc_difference 2115: note = n indicates cytidine, 5-methylcytidine, or 5-hydroxymethylcytidine
  misc_difference 2124: note = n indicates cytidine, 5-methylcytidine, or 5-hydroxymethylcytidine
  misc_difference 2125: note = n indicates cytidine, 5-methylcytidine, or 5-hydroxymethylcytidine
  misc_difference 2127: note = n indicates cytidine, 5-methylcytidine, or 5-hydroxymethylcytidine
  misc_difference 2128: note = n indicates cytidine, 5-methylcytidine, or 5-hydroxymethylcytidine
  misc_difference 2129: note = n indicates cytidine, 5-methylcytidine, or 5-hydroxymethylcytidine
  misc_difference 2132: note = n indicates cytidine, 5-methylcytidine, or 5-hydroxymethylcytidine
  misc_difference 2133: note = n indicates cytidine, 5-methylcytidine, or 5-hydroxymethylcytidine
  misc_difference 2141: note = n indicates cytidine, 5-methylcytidine, or 5-hydroxymethylcytidine
  misc_difference 2143: note = n indicates cytidine, 5-methylcytidine, or 5-hydroxymethylcytidine
  misc_difference 2144: note = n indicates cytidine, 5-methylcytidine, or 5-hydroxymethylcytidine
  misc_difference 2147: note = n indicates cytidine, 5-methylcytidine, or 5-hydroxymethylcytidine
  misc_difference 2154: note = n indicates cytidine, 5-methylcytidine, or 5-hydroxymethylcytidine
  misc_difference 2161: note = n indicates cytidine, 5-methylcytidine, or 5-hydroxymethylcytidine
  misc_difference 2163: note = n indicates cytidine, 5-methylcytidine, or 5-hydroxymethylcytidine
  misc_difference 2166: note = n indicates cytidine, 5-methylcytidine, or 5-hydroxymethylcytidine
  misc_difference 2167: note = n indicates cytidine, 5-methylcytidine, or 5-hydroxymethylcytidine
  misc_difference 2170: note = n indicates cytidine, 5-methylcytidine, or 5-hydroxymethylcytidine
  misc_difference 2171: note = n indicates cytidine, 5-methylcytidine, or 5-hydroxymethylcytidine
  misc_difference 2173: note = n indicates cytidine, 5-methylcytidine, or 5-hydroxymethylcytidine
  misc_difference 2175: note = n indicates cytidine, 5-methylcytidine, or 5-hydroxymethylcytidine
  misc_difference 2176: note = n indicates cytidine, 5-methylcytidine, or 5-hydroxymethylcytidine
  misc_difference 2180: note = n indicates cytidine, 5-methylcytidine, or 5-hydroxymethylcytidine
  misc_difference 2181: note = n indicates cytidine, 5-methylcytidine, or 5-hydroxymethylcytidine
  misc_difference 2187: note = n indicates cytidine, 5-methylcytidine, or 5-hydroxymethylcytidine
  misc_difference 2188: note = n indicates cytidine, 5-methylcytidine, or 5-hydroxymethylcytidine
  misc_difference 2191: note = n indicates cytidine, 5-methylcytidine, or 5-hydroxymethylcytidine
  misc_difference 2192: note = n indicates cytidine, 5-methylcytidine, or 5-hydroxymethylcytidine
  misc_difference 2207: note = n indicates cytidine, 5-methylcytidine, or 5-hydroxymethylcytidine
  misc_difference 2211: note = n indicates cytidine, 5-methylcytidine, or 5-hydroxymethylcytidine
  misc_difference 2212: note = n indicates cytidine, 5-methylcytidine, or 5-hydroxymethylcytidine
  misc_difference 2218: note = n indicates cytidine, 5-methylcytidine, or 5-hydroxymethylcytidine
  misc_difference 2222: note = n indicates cytidine, 5-methylcytidine, or 5-hydroxymethylcytidine
  misc_difference 2227: note = n indicates cytidine, 5-methylcytidine, or 5-hydroxymethylcytidine
  misc_difference 2231: note = n indicates cytidine, 5-methylcytidine, or 5-hydroxymethylcytidine
  misc_difference 2234: note = n indicates cytidine, 5-methylcytidine, or 5-hydroxymethylcytidine
  misc_difference 2243: note = n indicates cytidine, 5-methylcytidine, or 5-hydroxymethylcytidine
  misc_difference 2245: note = n indicates cytidine, 5-methylcytidine, or 5-hydroxymethylcytidine
  misc_difference 2249: note = n indicates cytidine, 5-methylcytidine, or 5-hydroxymethylcytidine
  misc_difference 2251: note = n indicates cytidine, 5-methylcytidine, or 5-hydroxymethylcytidine
  misc_difference 2252: note = n indicates cytidine, 5-methylcytidine, or 5-hydroxymethylcytidine
  misc_difference 2262: note = n indicates cytidine, 5-methylcytidine, or 5-hydroxymethylcytidine
  misc_difference 2273: note = n indicates cytidine, 5-methylcytidine, or 5-hydroxymethylcytidine
  misc_difference 2275: note = n indicates cytidine, 5-methylcytidine, or 5-hydroxymethylcytidine
  misc_difference 2276: note = n indicates cytidine, 5-methylcytidine, or 5-hydroxymethylcytidine
  misc_difference 2288: note = n indicates cytidine, 5-methylcytidine, or 5-hydroxymethylcytidine
  misc_difference 2293: note = n indicates cytidine, 5-methylcytidine, or 5-hydroxymethylcytidine
  misc_difference 2309: note = n indicates cytidine, 5-methylcytidine, or 5-hydroxymethylcytidine
  misc_difference 2312: note = n indicates cytidine, 5-methylcytidine, or 5-hydroxymethylcytidine
  misc_difference 2328: note = n indicates cytidine, 5-methylcytidine, or 5-hydroxymethylcytidine
  misc_difference 2333: note = n indicates cytidine, 5-methylcytidine, or 5-hydroxymethylcytidine
  misc_difference 2336: note = n indicates cytidine, 5-methylcytidine, or 5-hydroxymethylcytidine
  misc_difference 2341: note = n indicates cytidine, 5-methylcytidine, or 5-hydroxymethylcytidine
  misc_difference 2342: note = n indicates cytidine, 5-methylcytidine, or 5-hydroxymethylcytidine
  misc_difference 2347: note = n indicates cytidine, 5-methylcytidine, or 5-hydroxymethylcytidine
  misc_difference 2354: note = n indicates cytidine, 5-methylcytidine, or 5-hydroxymethylcytidine
  misc_difference 2356: note = n indicates cytidine, 5-methylcytidine, or 5-hydroxymethylcytidine
  misc_difference 2361: note = n indicates cytidine, 5-methylcytidine, or 5-hydroxymethylcytidine
  misc_difference 2363: note = n indicates cytidine, 5-methylcytidine, or 5-hydroxymethylcytidine
  misc_difference 2375: note = n indicates cytidine, 5-methylcytidine, or 5-hydroxymethylcytidine
  misc_difference 2379: note = n indicates cytidine, 5-methylcytidine, or 5-hydroxymethylcytidine
  misc_difference 2381: note = n indicates cytidine, 5-methylcytidine, or 5-hydroxymethylcytidine
  misc_difference 2382: note = n indicates cytidine, 5-methylcytidine, or 5-hydroxymethylcytidine
  misc_difference 2383: note = n indicates cytidine, 5-methylcytidine, or 5-hydroxymethylcytidine
  misc_difference 2384: note = n indicates cytidine, 5-methylcytidine, or 5-hydroxymethylcytidine
  misc_difference 2392: note = n indicates cytidine, 5-methylcytidine, or 5-hydroxymethylcytidine
  misc_difference 2393: note = n indicates cytidine, 5-methylcytidine, or 5-hydroxymethylcytidine
  misc_difference 2394: note = n indicates cytidine, 5-methylcytidine, or 5-hydroxymethylcytidine
  misc_difference 2405: note = n indicates cytidine, 5-methylcytidine, or 5-hydroxymethylcytidine
  misc_difference 2410: note = n indicates cytidine, 5-methylcytidine, or 5-hydroxymethylcytidine
  misc_difference 2416: note = n indicates cytidine, 5-methylcytidine, or 5-hydroxymethylcytidine
  misc_difference 2421: note = n indicates cytidine, 5-methylcytidine, or 5-hydroxymethylcytidine
  misc_difference 2425: note = n indicates cytidine, 5-methylcytidine, or 5-hydroxymethylcytidine
  misc_difference 2431: note = n indicates cytidine, 5-methylcytidine, or 5-hydroxymethylcytidine
  misc_difference 2433: note = n indicates cytidine, 5-methylcytidine, or 5-hydroxymethylcytidine
  misc_difference 2435: note = n indicates cytidine, 5-methylcytidine, or 5-hydroxymethylcytidine
  misc_difference 2440: note = n indicates cytidine, 5-methylcytidine, or 5-hydroxymethylcytidine
  misc_difference 2442: note = n indicates cytidine, 5-methylcytidine, or 5-hydroxymethylcytidine
  misc_difference 2444: note = n indicates cytidine, 5-methylcytidine, or 5-hydroxymethylcytidine
  misc_difference 2449: note = n indicates cytidine, 5-methylcytidine, or 5-hydroxymethylcytidine
  misc_difference 2450: note = n indicates cytidine, 5-methylcytidine, or 5-hydroxymethylcytidine
  misc_difference 2460: note = n indicates cytidine, 5-methylcytidine, or 5-hydroxymethylcytidine
  misc_difference 2461: note = n indicates cytidine, 5-methylcytidine, or 5-hydroxymethylcytidine
  misc_difference 2470: note = n indicates cytidine, 5-methylcytidine, or 5-hydroxymethylcytidine
  misc_difference 2475: note = n indicates cytidine, 5-methylcytidine, or 5-hydroxymethylcytidine
  misc_difference 2477: note = n indicates cytidine, 5-methylcytidine, or 5-hydroxymethylcytidine
  misc_difference 2480: note = n indicates cytidine, 5-methylcytidine, or 5-hydroxymethylcytidine
  misc_difference 2487: note = n indicates cytidine, 5-methylcytidine, or 5-hydroxymethylcytidine
  misc_difference 2488: note = n indicates cytidine, 5-methylcytidine, or 5-hydroxymethylcytidine
  misc_difference 2489: note = n indicates cytidine, 5-methylcytidine, or 5-hydroxymethylcytidine
  misc_difference 2493: note = n indicates cytidine, 5-methylcytidine, or 5-hydroxymethylcytidine
  misc_difference 2498: note = n indicates cytidine, 5-methylcytidine, or 5-hydroxymethylcytidine
  misc_difference 2510: note = n indicates cytidine, 5-methylcytidine, or 5-hydroxymethylcytidine
  misc_difference 2519: note = n indicates cytidine, 5-methylcytidine, or 5-hydroxymethylcytidine
  misc_difference 2520: note = n indicates cytidine, 5-methylcytidine, or 5-hydroxymethylcytidine
  misc_difference 2529: note = n indicates cytidine, 5-methylcytidine, or 5-hydroxymethylcytidine
  misc_difference 2537: note = n indicates cytidine, 5-methylcytidine, or 5-hydroxymethylcytidine
  misc_difference 2538: note = n indicates cytidine, 5-methylcytidine, or 5-hydroxymethylcytidine
  misc_difference 2540: note = n indicates cytidine, 5-methylcytidine, or 5-hydroxymethylcytidine
  misc_difference 2549: note = n indicates cytidine, 5-methylcytidine, or 5-hydroxymethylcytidine
  misc_difference 2551: note = n indicates cytidine, 5-methylcytidine, or 5-hydroxymethylcytidine
  misc_difference 2553: note = n indicates cytidine, 5-methylcytidine, or 5-hydroxymethylcytidine
  misc_difference 2558: note = n indicates cytidine, 5-methylcytidine, or 5-hydroxymethylcytidine
  misc_difference 2561: note = n indicates cytidine, 5-methylcytidine, or 5-hydroxymethylcytidine
  misc_difference 2562: note = n indicates cytidine, 5-methylcytidine, or 5-hydroxymethylcytidine
  misc_difference 2564: note = n indicates cytidine, 5-methylcytidine, or 5-hydroxymethylcytidine
  misc_difference 2570: note = n indicates cytidine, 5-methylcytidine, or 5-hydroxymethylcytidine
  misc_difference 2573: note = n indicates cytidine, 5-methylcytidine, or 5-hydroxymethylcytidine
  misc_difference 2575: note = n indicates cytidine, 5-methylcytidine, or 5-hydroxymethylcytidine
  misc_difference 2577: note = n indicates cytidine, 5-methylcytidine, or 5-hydroxymethylcytidine
  misc_difference 2579: note = n indicates cytidine, 5-methylcytidine, or 5-hydroxymethylcytidine
  misc_difference 2580: note = n indicates cytidine, 5-methylcytidine, or 5-hydroxymethylcytidine
  misc_difference 2585: note = n indicates cytidine, 5-methylcytidine, or 5-hydroxymethylcytidine
  misc_difference 2587: note = n indicates cytidine, 5-methylcytidine, or 5-hydroxymethylcytidine
  misc_difference 2593: note = n indicates cytidine, 5-methylcytidine, or 5-hydroxymethylcytidine
  misc_difference 2599: note = n indicates cytidine, 5-methylcytidine, or 5-hydroxymethylcytidine
  misc_difference 2602: note = n indicates cytidine, 5-methylcytidine, or 5-hydroxymethylcytidine
  misc_difference 2606: note = n indicates cytidine, 5-methylcytidine, or 5-hydroxymethylcytidine
  misc_difference 2609: note = n indicates cytidine, 5-methylcytidine, or 5-hydroxymethylcytidine
  misc_difference 2611: note = n indicates cytidine, 5-methylcytidine, or 5-hydroxymethylcytidine
  misc_difference 2614: note = n indicates cytidine, 5-methylcytidine, or 5-hydroxymethylcytidine
  misc_difference 2615: note = n indicates cytidine, 5-methylcytidine, or 5-hydroxymethylcytidine
  misc_difference 2624: note = n indicates cytidine, 5-methylcytidine, or 5-hydroxymethylcytidine
  misc_difference 2627: note = n indicates cytidine, 5-methylcytidine, or 5-hydroxymethylcytidine
  misc_difference 2641: note = n indicates cytidine, 5-methylcytidine, or 5-hydroxymethylcytidine
  misc_difference 2644: note = n indicates cytidine, 5-methylcytidine, or 5-hydroxymethylcytidine
  misc_difference 2649: note = n indicates cytidine, 5-methylcytidine, or 5-hydroxymethylcytidine
  misc_difference 2650: note = n indicates cytidine, 5-methylcytidine, or 5-hydroxymethylcytidine
  misc_difference 2659: note = n indicates cytidine, 5-methylcytidine, or 5-hydroxymethylcytidine
  misc_difference 2675: note = n indicates cytidine, 5-methylcytidine, or 5-hydroxymethylcytidine
  misc_difference 2677: note = n indicates cytidine, 5-methylcytidine, or 5-hydroxymethylcytidine
  misc_difference 2680: note = n indicates cytidine, 5-methylcytidine, or 5-hydroxymethylcytidine
  misc_difference 2681: note = n indicates cytidine, 5-methylcytidine, or 5-hydroxymethylcytidine
  misc_difference 2684: note = n indicates cytidine, 5-methylcytidine, or 5-hydroxymethylcytidine
  misc_difference 2689: note = n indicates cytidine, 5-methylcytidine, or 5-hydroxymethylcytidine
  misc_difference 2690: note = n indicates cytidine, 5-methylcytidine, or 5-hydroxymethylcytidine
  misc_difference 2694: note = n indicates cytidine, 5-methylcytidine, or 5-hydroxymethylcytidine
  misc_difference 2695: note = n indicates cytidine, 5-methylcytidine, or 5-hydroxymethylcytidine
  misc_difference 2700: note = n indicates cytidine, 5-methylcytidine, or 5-hydroxymethylcytidine
  misc_difference 2705: note = n indicates cytidine, 5-methylcytidine, or 5-hydroxymethylcytidine
  misc_difference 2709: note = n indicates cytidine, 5-methylcytidine, or 5-hydroxymethylcytidine
  misc_difference 2711: note = n indicates cytidine, 5-methylcytidine, or 5-hydroxymethylcytidine
  misc_difference 2715: note = n indicates cytidine, 5-methylcytidine, or 5-hydroxymethylcytidine
  misc_difference 2717: note = n indicates cytidine, 5-methylcytidine, or 5-hydroxymethylcytidine
  misc_difference 2719: note = n indicates cytidine, 5-methylcytidine, or 5-hydroxymethylcytidine
  misc_difference 2726: note = n indicates cytidine, 5-methylcytidine, or 5-hydroxymethylcytidine
  misc_difference 2742: note = n indicates cytidine, 5-methylcytidine, or 5-hydroxymethylcytidine
  misc_difference 2748: note = n indicates cytidine, 5-methylcytidine, or 5-hydroxymethylcytidine
  misc_difference 2759: note = n indicates cytidine, 5-methylcytidine, or 5-hydroxymethylcytidine
  misc_difference 2765: note = n indicates cytidine, 5-methylcytidine, or 5-hydroxymethylcytidine
  misc_difference 2768: note = n indicates cytidine, 5-methylcytidine, or 5-hydroxymethylcytidine
  misc_difference 2779: note = n indicates cytidine, 5-methylcytidine, or 5-hydroxymethylcytidine
  misc_difference 2782: note = n indicates cytidine, 5-methylcytidine, or 5-hydroxymethylcytidine
  misc_difference 2785: note = n indicates cytidine, 5-methylcytidine, or 5-hydroxymethylcytidine
  misc_difference 2788: note = n indicates cytidine, 5-methylcytidine, or 5-hydroxymethylcytidine
  misc_difference 2789: note = n indicates cytidine, 5-methylcytidine, or 5-hydroxymethylcytidine
  misc_difference 2791: note = n indicates cytidine, 5-methylcytidine, or 5-hydroxymethylcytidine
  misc_difference 2793: note = n indicates cytidine, 5-methylcytidine, or 5-hydroxymethylcytidine
  misc_difference 2799: note = n indicates cytidine, 5-methylcytidine, or 5-hydroxymethylcytidine
  misc_difference 2803: note = n indicates cytidine, 5-methylcytidine, or 5-hydroxymethylcytidine
  misc_difference 2804: note = n indicates cytidine, 5-methylcytidine, or 5-hydroxymethylcytidine
  misc_difference 2805: note = n indicates cytidine, 5-methylcytidine, or 5-hydroxymethylcytidine
  misc_difference 2821: note = n indicates cytidine, 5-methylcytidine, or 5-hydroxymethylcytidine
  misc_difference 2822: note = n indicates cytidine, 5-methylcytidine, or 5-hydroxymethylcytidine
  misc_difference 2826: note = n indicates cytidine, 5-methylcytidine, or 5-hydroxymethylcytidine
  misc_difference 2831: note = n indicates cytidine, 5-methylcytidine, or 5-hydroxymethylcytidine
  misc_difference 2847: note = n indicates cytidine, 5-methylcytidine, or 5-hydroxymethylcytidine
  misc_difference 2848: note = n indicates cytidine, 5-methylcytidine, or 5-hydroxymethylcytidine
  misc_difference 2850: note = n indicates cytidine, 5-methylcytidine, or 5-hydroxymethylcytidine
  misc_difference 2855: note = n indicates cytidine, 5-methylcytidine, or 5-hydroxymethylcytidine
  misc_difference 2857: note = n indicates cytidine, 5-methylcytidine, or 5-hydroxymethylcytidine
  misc_difference 2859: note = n indicates cytidine, 5-methylcytidine, or 5-hydroxymethylcytidine
  misc_difference 2860: note = n indicates cytidine, 5-methylcytidine, or 5-hydroxymethylcytidine
  misc_difference 2861: note = n indicates cytidine, 5-methylcytidine, or 5-hydroxymethylcytidine
  misc_difference 2863: note = n indicates cytidine, 5-methylcytidine, or 5-hydroxymethylcytidine
  misc_difference 2864: note = n indicates cytidine, 5-methylcytidine, or 5-hydroxymethylcytidine
  misc_difference 2866: note = n indicates cytidine, 5-methylcytidine, or 5-hydroxymethylcytidine
  misc_difference 2871: note = n indicates cytidine, 5-methylcytidine, or 5-hydroxymethylcytidine
  misc_difference 2879: note = n indicates cytidine, 5-methylcytidine, or 5-hydroxymethylcytidine
  misc_difference 2882: note = n indicates cytidine, 5-methylcytidine, or 5-hydroxymethylcytidine
  misc_difference 2883: note = n indicates cytidine, 5-methylcytidine, or 5-hydroxymethylcytidine
  misc_difference 2886: note = n indicates cytidine, 5-methylcytidine, or 5-hydroxymethylcytidine
  misc_difference 2890: note = n indicates cytidine, 5-methylcytidine, or 5-hydroxymethylcytidine
  misc_difference 2891: note = n indicates cytidine, 5-methylcytidine, or 5-hydroxymethylcytidine
  misc_difference 2892: note = n indicates cytidine, 5-methylcytidine, or 5-hydroxymethylcytidine
  misc_difference 2894: note = n indicates cytidine, 5-methylcytidine, or 5-hydroxymethylcytidine
  misc_difference 2896: note = n indicates cytidine, 5-methylcytidine, or 5-hydroxymethylcytidine
  misc_difference 2903: note = n indicates cytidine, 5-methylcytidine, or 5-hydroxymethylcytidine
  misc_difference 2904: note = n indicates cytidine, 5-methylcytidine, or 5-hydroxymethylcytidine
  misc_difference 2906: note = n indicates cytidine, 5-methylcytidine, or 5-hydroxymethylcytidine
  misc_difference 2909: note = n indicates cytidine, 5-methylcytidine, or 5-hydroxymethylcytidine
  misc_difference 2920: note = n indicates cytidine, 5-methylcytidine, or 5-hydroxymethylcytidine
  misc_difference 2922: note = n indicates cytidine, 5-methylcytidine, or 5-hydroxymethylcytidine
  misc_difference 2926: note = n indicates cytidine, 5-methylcytidine, or 5-hydroxymethylcytidine
  misc_difference 2927: note = n indicates cytidine, 5-methylcytidine, or 5-hydroxymethylcytidine
  misc_difference 2930: note = n indicates cytidine, 5-methylcytidine, or 5-hydroxymethylcytidine
  misc_difference 2933: note = n indicates cytidine, 5-methylcytidine, or 5-hydroxymethylcytidine
  misc_difference 2934: note = n indicates cytidine, 5-methylcytidine, or 5-hydroxymethylcytidine
  misc_difference 2935: note = n indicates cytidine, 5-methylcytidine, or 5-hydroxymethylcytidine
  misc_difference 2947: note = n indicates cytidine, 5-methylcytidine, or 5-hydroxymethylcytidine
  misc_difference 2949: note = n indicates cytidine, 5-methylcytidine, or 5-hydroxymethylcytidine
  misc_difference 2953: note = n indicates cytidine, 5-methylcytidine, or 5-hydroxymethylcytidine
  misc_difference 2956: note = n indicates cytidine, 5-methylcytidine, or 5-hydroxymethylcytidine
  misc_difference 2957: note = n indicates cytidine, 5-methylcytidine, or 5-hydroxymethylcytidine
  misc_difference 2963: note = n indicates cytidine, 5-methylcytidine, or 5-hydroxymethylcytidine
  misc_difference 2964: note = n indicates cytidine, 5-methylcytidine, or 5-hydroxymethylcytidine
  misc_difference 2965: note = n indicates cytidine, 5-methylcytidine, or 5-hydroxymethylcytidine
  misc_difference 2975: note = n indicates cytidine, 5-methylcytidine, or 5-hydroxymethylcytidine
  misc_difference 2977: note = n indicates cytidine, 5-methylcytidine, or 5-hydroxymethylcytidine
  misc_difference 2980: note = n indicates cytidine, 5-methylcytidine, or 5-hydroxymethylcytidine
  misc_difference 2981: note = n indicates cytidine, 5-methylcytidine, or 5-hydroxymethylcytidine
  misc_difference 2983: note = n indicates cytidine, 5-methylcytidine, or 5-hydroxymethylcytidine
  misc_difference 2997: note = n indicates cytidine, 5-methylcytidine, or 5-hydroxymethylcytidine
  misc_difference 3001: note = n indicates cytidine, 5-methylcytidine, or 5-hydroxymethylcytidine
  misc_difference 3006: note = n indicates cytidine, 5-methylcytidine, or 5-hydroxymethylcytidine
  misc_difference 3013: note = n indicates cytidine, 5-methylcytidine, or 5-hydroxymethylcytidine
  misc_difference 3014: note = n indicates cytidine, 5-methylcytidine, or 5-hydroxymethylcytidine
  misc_difference 3017: note = n indicates cytidine, 5-methylcytidine, or 5-hydroxymethylcytidine
  misc_difference 3024: note = n indicates cytidine, 5-methylcytidine, or 5-hydroxymethylcytidine
  misc_difference 3026: note = n indicates cytidine, 5-methylcytidine, or 5-hydroxymethylcytidine
  misc_difference 3029: note = n indicates cytidine, 5-methylcytidine, or 5-hydroxymethylcytidine
  misc_difference 3039: note = n indicates cytidine, 5-methylcytidine, or 5-hydroxymethylcytidine
  misc_difference 3040: note = n indicates cytidine, 5-methylcytidine, or 5-hydroxymethylcytidine
  misc_difference 3044: note = n indicates cytidine, 5-methylcytidine, or 5-hydroxymethylcytidine
  misc_difference 3045: note = n indicates cytidine, 5-methylcytidine, or 5-hydroxymethylcytidine
  misc_difference 3046: note = n indicates cytidine, 5-methylcytidine, or 5-hydroxymethylcytidine
  misc_difference 3049: note = n indicates cytidine, 5-methylcytidine, or 5-hydroxymethylcytidine
  misc_difference 3050: note = n indicates cytidine, 5-methylcytidine, or 5-hydroxymethylcytidine
  misc_difference 3053: note = n indicates cytidine, 5-methylcytidine, or 5-hydroxymethylcytidine
  misc_difference 3056: note = n indicates cytidine, 5-methylcytidine, or 5-hydroxymethylcytidine
  misc_difference 3059: note = n indicates cytidine, 5-methylcytidine, or 5-hydroxymethylcytidine
  misc_difference 3060: note = n indicates cytidine, 5-methylcytidine, or 5-hydroxymethylcytidine
  misc_difference 3070: note = n indicates cytidine, 5-methylcytidine, or 5-hydroxymethylcytidine
  misc_difference 3074: note = n indicates cytidine, 5-methylcytidine, or 5-hydroxymethylcytidine
  misc_difference 3085: note = n indicates cytidine, 5-methylcytidine, or 5-hydroxymethylcytidine
  misc_difference 3086: note = n indicates cytidine, 5-methylcytidine, or 5-hydroxymethylcytidine
  misc_difference 3091: note = n indicates cytidine, 5-methylcytidine, or 5-hydroxymethylcytidine
  misc_difference 3099: note = n indicates cytidine, 5-methylcytidine, or 5-hydroxymethylcytidine
  misc_difference 3100: note = n indicates cytidine, 5-methylcytidine, or 5-hydroxymethylcytidine
  misc_difference 3105: note = n indicates cytidine, 5-methylcytidine, or 5-hydroxymethylcytidine
  misc_difference 3112: note = n indicates cytidine, 5-methylcytidine, or 5-hydroxymethylcytidine
  misc_difference 3113: note = n indicates cytidine, 5-methylcytidine, or 5-hydroxymethylcytidine
  misc_difference 3115: note = n indicates cytidine, 5-methylcytidine, or 5-hydroxymethylcytidine
  misc_difference 3119: note = n indicates cytidine, 5-methylcytidine, or 5-hydroxymethylcytidine
  misc_difference 3125: note = n indicates cytidine, 5-methylcytidine, or 5-hydroxymethylcytidine
  misc_difference 3130: note = n indicates cytidine, 5-methylcytidine, or 5-hydroxymethylcytidine
  misc_difference 3131: note = n indicates cytidine, 5-methylcytidine, or 5-hydroxymethylcytidine
  misc_difference 3133: note = n indicates cytidine, 5-methylcytidine, or 5-hydroxymethylcytidine
  misc_difference 3138: note = n indicates cytidine, 5-methylcytidine, or 5-hydroxymethylcytidine
  misc_difference 3146: note = n indicates cytidine, 5-methylcytidine, or 5-hydroxymethylcytidine
  misc_difference 3148: note = n indicates cytidine, 5-methylcytidine, or 5-hydroxymethylcytidine
  misc_difference 3166: note = n indicates cytidine, 5-methylcytidine, or 5-hydroxymethylcytidine
  misc_difference 3170: note = n indicates cytidine, 5-methylcytidine, or 5-hydroxymethylcytidine
  misc_difference 3175: note = n indicates cytidine, 5-methylcytidine, or 5-hydroxymethylcytidine
  misc_difference 3177: note = n indicates cytidine, 5-methylcytidine, or 5-hydroxymethylcytidine
  misc_difference 3179: note = n indicates cytidine, 5-methylcytidine, or 5-hydroxymethylcytidine
  misc_difference 3181: note = n indicates cytidine, 5-methylcytidine, or 5-hydroxymethylcytidine
  misc_difference 3184: note = n indicates cytidine, 5-methylcytidine, or 5-hydroxymethylcytidine
  misc_difference 3200: note = n indicates cytidine, 5-methylcytidine, or 5-hydroxymethylcytidine
  misc_difference 3201: note = n indicates cytidine, 5-methylcytidine, or 5-hydroxymethylcytidine
  misc_difference 3204: note = n indicates cytidine, 5-methylcytidine, or 5-hydroxymethylcytidine
  misc_difference 3209: note = n indicates cytidine, 5-methylcytidine, or 5-hydroxymethylcytidine
  misc_difference 3218: note = n indicates cytidine, 5-methylcytidine, or 5-hydroxymethylcytidine
  misc_difference 3225: note = n indicates cytidine, 5-methylcytidine, or 5-hydroxymethylcytidine
  misc_difference 3227: note = n indicates cytidine, 5-methylcytidine, or 5-hydroxymethylcytidine
  misc_difference 3231: note = n indicates cytidine, 5-methylcytidine, or 5-hydroxymethylcytidine
  misc_difference 3236: note = n indicates cytidine, 5-methylcytidine, or 5-hydroxymethylcytidine
  misc_difference 3238: note = n indicates cytidine, 5-methylcytidine, or 5-hydroxymethylcytidine
  misc_difference 3239: note = n indicates cytidine, 5-methylcytidine, or 5-hydroxymethylcytidine
  misc_difference 3243: note = n indicates cytidine, 5-methylcytidine, or 5-hydroxymethylcytidine
  misc_difference 3250: note = n indicates cytidine, 5-methylcytidine, or 5-hydroxymethylcytidine
  misc_difference 3253: note = n indicates cytidine, 5-methylcytidine, or 5-hydroxymethylcytidine
  misc_difference 3255: note = n indicates cytidine, 5-methylcytidine, or 5-hydroxymethylcytidine
  misc_difference 3256: note = n indicates cytidine, 5-methylcytidine, or 5-hydroxymethylcytidine
  misc_difference 3257: note = n indicates cytidine, 5-methylcytidine, or 5-hydroxymethylcytidine
  misc_difference 3259: note = n indicates cytidine, 5-methylcytidine, or 5-hydroxymethylcytidine
  misc_difference 3264: note = n indicates cytidine, 5-methylcytidine, or 5-hydroxymethylcytidine
  misc_difference 3265: note = n indicates cytidine, 5-methylcytidine, or 5-hydroxymethylcytidine
  misc_difference 3271: note = n indicates cytidine, 5-methylcytidine, or 5-hydroxymethylcytidine
  misc_difference 3272: note = n indicates cytidine, 5-methylcytidine, or 5-hydroxymethylcytidine
  misc_difference 3285: note = n indicates cytidine, 5-methylcytidine, or 5-hydroxymethylcytidine
  misc_difference 3287: note = n indicates cytidine, 5-methylcytidine, or 5-hydroxymethylcytidine
  misc_difference 3296: note = n indicates cytidine, 5-methylcytidine, or 5-hydroxymethylcytidine
  misc_difference 3298: note = n indicates cytidine, 5-methylcytidine, or 5-hydroxymethylcytidine
  misc_difference 3299: note = n indicates cytidine, 5-methylcytidine, or 5-hydroxymethylcytidine
  misc_difference 3300: note = n indicates cytidine, 5-methylcytidine, or 5-hydroxymethylcytidine
  misc_difference 3301: note = n indicates cytidine, 5-methylcytidine, or 5-hydroxymethylcytidine
  misc_difference 3304: note = n indicates cytidine, 5-methylcytidine, or 5-hydroxymethylcytidine
  misc_difference 3306: note = n indicates cytidine, 5-methylcytidine, or 5-hydroxymethylcytidine
  misc_difference 3307: note = n indicates cytidine, 5-methylcytidine, or 5-hydroxymethylcytidine
  misc_difference 3311: note = n indicates cytidine, 5-methylcytidine, or 5-hydroxymethylcytidine
  misc_difference 3317: note = n indicates cytidine, 5-methylcytidine, or 5-hydroxymethylcytidine
  misc_difference 3321: note = n indicates cytidine, 5-methylcytidine, or 5-hydroxymethylcytidine
  misc_difference 3338: note = n indicates cytidine, 5-methylcytidine, or 5-hydroxymethylcytidine
  misc_difference 3339: note = n indicates cytidine, 5-methylcytidine, or 5-hydroxymethylcytidine
  misc_difference 3342: note = n indicates cytidine, 5-methylcytidine, or 5-hydroxymethylcytidine
  misc_difference 3345: note = n indicates cytidine, 5-methylcytidine, or 5-hydroxymethylcytidine
  misc_difference 3347: note = n indicates cytidine, 5-methylcytidine, or 5-hydroxymethylcytidine
  misc_difference 3349: note = n indicates cytidine, 5-methylcytidine, or 5-hydroxymethylcytidine
  misc_difference 3351: note = n indicates cytidine, 5-methylcytidine, or 5-hydroxymethylcytidine
  misc_difference 3353: note = n indicates cytidine, 5-methylcytidine, or 5-hydroxymethylcytidine
  misc_difference 3359: note = n indicates cytidine, 5-methylcytidine, or 5-hydroxymethylcytidine
  misc_difference 3360: note = n indicates cytidine, 5-methylcytidine, or 5-hydroxymethylcytidine
  misc_difference 3361: note = n indicates cytidine, 5-methylcytidine, or 5-hydroxymethylcytidine
  misc_difference 3363: note = n indicates cytidine, 5-methylcytidine, or 5-hydroxymethylcytidine
  misc_difference 3366: note = n indicates cytidine, 5-methylcytidine, or 5-hydroxymethylcytidine
  misc_difference 3369: note = n indicates cytidine, 5-methylcytidine, or 5-hydroxymethylcytidine
  misc_difference 3370: note = n indicates cytidine, 5-methylcytidine, or 5-hydroxymethylcytidine
  misc_difference 3372: note = n indicates cytidine, 5-methylcytidine, or 5-hydroxymethylcytidine
  misc_difference 3376: note = n indicates cytidine, 5-methylcytidine, or 5-hydroxymethylcytidine
  misc_difference 3382: note = n indicates cytidine, 5-methylcytidine, or 5-hydroxymethylcytidine
  misc_difference 3383: note = n indicates cytidine, 5-methylcytidine, or 5-hydroxymethylcytidine
  misc_difference 3385: note = n indicates cytidine, 5-methylcytidine, or 5-hydroxymethylcytidine
  misc_difference 3395: note = n indicates cytidine, 5-methylcytidine, or 5-hydroxymethylcytidine
  misc_difference 3401: note = n indicates cytidine, 5-methylcytidine, or 5-hydroxymethylcytidine
  misc_difference 3407: note = n indicates cytidine, 5-methylcytidine, or 5-hydroxymethylcytidine
  misc_difference 3409: note = n indicates cytidine, 5-methylcytidine, or 5-hydroxymethylcytidine
  misc_difference 3415: note = n indicates cytidine, 5-methylcytidine, or 5-hydroxymethylcytidine
  misc_difference 3417: note = n indicates cytidine, 5-methylcytidine, or 5-hydroxymethylcytidine
  misc_difference 3420: note = n indicates cytidine, 5-methylcytidine, or 5-hydroxymethylcytidine
  misc_difference 3422: note = n indicates cytidine, 5-methylcytidine, or 5-hydroxymethylcytidine
  misc_difference 3432: note = n indicates cytidine, 5-methylcytidine, or 5-hydroxymethylcytidine
  misc_difference 3433: note = n indicates cytidine, 5-methylcytidine, or 5-hydroxymethylcytidine
  misc_difference 3435: note = n indicates cytidine, 5-methylcytidine, or 5-hydroxymethylcytidine
  misc_difference 3437: note = n indicates cytidine, 5-methylcytidine, or 5-hydroxymethylcytidine
  misc_difference 3443: note = n indicates cytidine, 5-methylcytidine, or 5-hydroxymethylcytidine
  misc_difference 3444: note = n indicates cytidine, 5-methylcytidine, or 5-hydroxymethylcytidine
  misc_difference 3450: note = n indicates cytidine, 5-methylcytidine, or 5-hydroxymethylcytidine
  misc_difference 3451: note = n indicates cytidine, 5-methylcytidine, or 5-hydroxymethylcytidine
  misc_difference 3458: note = n indicates cytidine, 5-methylcytidine, or 5-hydroxymethylcytidine
  misc_difference 3465: note = n indicates cytidine, 5-methylcytidine, or 5-hydroxymethylcytidine
  misc_difference 3468: note = n indicates cytidine, 5-methylcytidine, or 5-hydroxymethylcytidine
  misc_difference 3469: note = n indicates cytidine, 5-methylcytidine, or 5-hydroxymethylcytidine
  misc_difference 3471: note = n indicates cytidine, 5-methylcytidine, or 5-hydroxymethylcytidine
  misc_difference 3475: note = n indicates cytidine, 5-methylcytidine, or 5-hydroxymethylcytidine
  misc_difference 3482: note = n indicates cytidine, 5-methylcytidine, or 5-hydroxymethylcytidine
  misc_difference 3483: note = n indicates cytidine, 5-methylcytidine, or 5-hydroxymethylcytidine
  misc_difference 3485: note = n indicates cytidine, 5-methylcytidine, or 5-hydroxymethylcytidine
  misc_difference 3486: note = n indicates cytidine, 5-methylcytidine, or 5-hydroxymethylcytidine
  misc_difference 3488: note = n indicates cytidine, 5-methylcytidine, or 5-hydroxymethylcytidine
  misc_difference 3489: note = n indicates cytidine, 5-methylcytidine, or 5-hydroxymethylcytidine
  misc_difference 3498: note = n indicates cytidine, 5-methylcytidine, or 5-hydroxymethylcytidine
  misc_difference 3500: note = n indicates cytidine, 5-methylcytidine, or 5-hydroxymethylcytidine
  misc_difference 3501: note = n indicates cytidine, 5-methylcytidine, or 5-hydroxymethylcytidine
  misc_difference 3502: note = n indicates cytidine, 5-methylcytidine, or 5-hydroxymethylcytidine
  misc_difference 3504: note = n indicates cytidine, 5-methylcytidine, or 5-hydroxymethylcytidine
  misc_difference 3512: note = n indicates cytidine, 5-methylcytidine, or 5-hydroxymethylcytidine
  misc_difference 3517: note = n indicates cytidine, 5-methylcytidine, or 5-hydroxymethylcytidine
  misc_difference 3520: note = n indicates cytidine, 5-methylcytidine, or 5-hydroxymethylcytidine
  misc_difference 3524: note = n indicates cytidine, 5-methylcytidine, or 5-hydroxymethylcytidine
  misc_difference 3527: note = n indicates cytidine, 5-methylcytidine, or 5-hydroxymethylcytidine
  misc_difference 3530: note = n indicates cytidine, 5-methylcytidine, or 5-hydroxymethylcytidine
  misc_difference 3542: note = n indicates cytidine, 5-methylcytidine, or 5-hydroxymethylcytidine
  misc_difference 3547: note = n indicates cytidine, 5-methylcytidine, or 5-hydroxymethylcytidine
  misc_difference 3551: note = n indicates cytidine, 5-methylcytidine, or 5-hydroxymethylcytidine
  misc_difference 3552: note = n indicates cytidine, 5-methylcytidine, or 5-hydroxymethylcytidine
  misc_difference 3560: note = n indicates cytidine, 5-methylcytidine, or 5-hydroxymethylcytidine
  misc_difference 3574: note = n indicates cytidine, 5-methylcytidine, or 5-hydroxymethylcytidine
  misc_difference 3575: note = n indicates cytidine, 5-methylcytidine, or 5-hydroxymethylcytidine
  misc_difference 3578: note = n indicates cytidine, 5-methylcytidine, or 5-hydroxymethylcytidine
  misc_difference 3579: note = n indicates cytidine, 5-methylcytidine, or 5-hydroxymethylcytidine
  misc_difference 3580: note = n indicates cytidine, 5-methylcytidine, or 5-hydroxymethylcytidine
  misc_difference 3584: note = n indicates cytidine, 5-methylcytidine, or 5-hydroxymethylcytidine
  misc_difference 3596: note = n indicates cytidine, 5-methylcytidine, or 5-hydroxymethylcytidine
  misc_difference 3604: note = n indicates cytidine, 5-methylcytidine, or 5-hydroxymethylcytidine
  misc_difference 3608: note = n indicates cytidine, 5-methylcytidine, or 5-hydroxymethylcytidine
  misc_difference 3609: note = n indicates cytidine, 5-methylcytidine, or 5-hydroxymethylcytidine
  misc_difference 3612: note = n indicates cytidine, 5-methylcytidine, or 5-hydroxymethylcytidine
  misc_difference 3613: note = n indicates cytidine, 5-methylcytidine, or 5-hydroxymethylcytidine
  misc_difference 3619: note = n indicates cytidine, 5-methylcytidine, or 5-hydroxymethylcytidine
  misc_difference 3622: note = n indicates cytidine, 5-methylcytidine, or 5-hydroxymethylcytidine
  misc_difference 3623: note = n indicates cytidine, 5-methylcytidine, or 5-hydroxymethylcytidine
  misc_difference 3626: note = n indicates cytidine, 5-methylcytidine, or 5-hydroxymethylcytidine
  misc_difference 3631: note = n indicates cytidine, 5-methylcytidine, or 5-hydroxymethylcytidine
  misc_difference 3633: note = n indicates cytidine, 5-methylcytidine, or 5-hydroxymethylcytidine
  misc_difference 3636: note = n indicates cytidine, 5-methylcytidine, or 5-hydroxymethylcytidine
  misc_difference 3647: note = n indicates cytidine, 5-methylcytidine, or 5-hydroxymethylcytidine
  misc_difference 3650: note = n indicates cytidine, 5-methylcytidine, or 5-hydroxymethylcytidine
  misc_difference 3651: note = n indicates cytidine, 5-methylcytidine, or 5-hydroxymethylcytidine
  misc_difference 3652: note = n indicates cytidine, 5-methylcytidine, or 5-hydroxymethylcytidine
  misc_difference 3663: note = n indicates cytidine, 5-methylcytidine, or 5-hydroxymethylcytidine
  misc_difference 3664: note = n indicates cytidine, 5-methylcytidine, or 5-hydroxymethylcytidine
  misc_difference 3665: note = n indicates cytidine, 5-methylcytidine, or 5-hydroxymethylcytidine
  misc_difference 3674: note = n indicates cytidine, 5-methylcytidine, or 5-hydroxymethylcytidine
  misc_difference 3697: note = n indicates cytidine, 5-methylcytidine, or 5-hydroxymethylcytidine
  misc_difference 3698: note = n indicates cytidine, 5-methylcytidine, or 5-hydroxymethylcytidine
  misc_difference 3699: note = n indicates cytidine, 5-methylcytidine, or 5-hydroxymethylcytidine
  misc_difference 3700: note = n indicates cytidine, 5-methylcytidine, or 5-hydroxymethylcytidine
  misc_difference 3710: note = n indicates cytidine, 5-methylcytidine, or 5-hydroxymethylcytidine
  misc_difference 3711: note = n indicates cytidine, 5-methylcytidine, or 5-hydroxymethylcytidine
  misc_difference 3714: note = n indicates cytidine, 5-methylcytidine, or 5-hydroxymethylcytidine
  misc_difference 3716: note = n indicates cytidine, 5-methylcytidine, or 5-hydroxymethylcytidine
  misc_difference 3720: note = n indicates cytidine, 5-methylcytidine, or 5-hydroxymethylcytidine
  misc_difference 3723: note = n indicates cytidine, 5-methylcytidine, or 5-hydroxymethylcytidine
  misc_difference 3734: note = n indicates cytidine, 5-methylcytidine, or 5-hydroxymethylcytidine
  misc_difference 3735: note = n indicates cytidine, 5-methylcytidine, or 5-hydroxymethylcytidine
  misc_difference 3739: note = n indicates cytidine, 5-methylcytidine, or 5-hydroxymethylcytidine
  misc_difference 3740: note = n indicates cytidine, 5-methylcytidine, or 5-hydroxymethylcytidine
  misc_difference 3747: note = n indicates cytidine, 5-methylcytidine, or 5-hydroxymethylcytidine
  misc_difference 3752: note = n indicates cytidine, 5-methylcytidine, or 5-hydroxymethylcytidine
  misc_difference 3760: note = n indicates cytidine, 5-methylcytidine, or 5-hydroxymethylcytidine
  misc_difference 3761: note = n indicates cytidine, 5-methylcytidine, or 5-hydroxymethylcytidine
  misc_difference 3769: note = n indicates cytidine, 5-methylcytidine, or 5-hydroxymethylcytidine
  misc_difference 3774: note = n indicates cytidine, 5-methylcytidine, or 5-hydroxymethylcytidine
  misc_difference 3777: note = n indicates cytidine, 5-methylcytidine, or 5-hydroxymethylcytidine
  misc_difference 3780: note = n indicates cytidine, 5-methylcytidine, or 5-hydroxymethylcytidine
  misc_difference 3786: note = n indicates cytidine, 5-methylcytidine, or 5-hydroxymethylcytidine
  misc_difference 3787: note = n indicates cytidine, 5-methylcytidine, or 5-hydroxymethylcytidine
  misc_difference 3788: note = n indicates cytidine, 5-methylcytidine, or 5-hydroxymethylcytidine
  misc_difference 3791: note = n indicates cytidine, 5-methylcytidine, or 5-hydroxymethylcytidine
  misc_difference 3796: note = n indicates cytidine, 5-methylcytidine, or 5-hydroxymethylcytidine
  misc_difference 3797: note = n indicates cytidine, 5-methylcytidine, or 5-hydroxymethylcytidine
  misc_difference 3803: note = n indicates cytidine, 5-methylcytidine, or 5-hydroxymethylcytidine
  misc_difference 3806: note = n indicates cytidine, 5-methylcytidine, or 5-hydroxymethylcytidine
  misc_difference 3821: note = n indicates cytidine, 5-methylcytidine, or 5-hydroxymethylcytidine
  misc_difference 3823: note = n indicates cytidine, 5-methylcytidine, or 5-hydroxymethylcytidine
  misc_difference 3827: note = n indicates cytidine, 5-methylcytidine, or 5-hydroxymethylcytidine
  misc_difference 3832: note = n indicates cytidine, 5-methylcytidine, or 5-hydroxymethylcytidine
  misc_difference 3833: note = n indicates cytidine, 5-methylcytidine, or 5-hydroxymethylcytidine
  misc_difference 3836: note = n indicates cytidine, 5-methylcytidine, or 5-hydroxymethylcytidine
  misc_difference 3842: note = n indicates cytidine, 5-methylcytidine, or 5-hydroxymethylcytidine
  misc_difference 3845: note = n indicates cytidine, 5-methylcytidine, or 5-hydroxymethylcytidine
  misc_difference 3853: note = n indicates cytidine, 5-methylcytidine, or 5-hydroxymethylcytidine
  misc_difference 3859: note = n indicates cytidine, 5-methylcytidine, or 5-hydroxymethylcytidine
  misc_difference 3861: note = n indicates cytidine, 5-methylcytidine, or 5-hydroxymethylcytidine
  misc_difference 3864: note = n indicates cytidine, 5-methylcytidine, or 5-hydroxymethylcytidine
  misc_difference 3869: note = n indicates cytidine, 5-methylcytidine, or 5-hydroxymethylcytidine
  misc_difference 3877: note = n indicates cytidine, 5-methylcytidine, or 5-hydroxymethylcytidine
  misc_difference 3878: note = n indicates cytidine, 5-methylcytidine, or 5-hydroxymethylcytidine
  misc_difference 3879: note = n indicates cytidine, 5-methylcytidine, or 5-hydroxymethylcytidine
  misc_difference 3887: note = n indicates cytidine, 5-methylcytidine, or 5-hydroxymethylcytidine
  misc_difference 3891: note = n indicates cytidine, 5-methylcytidine, or 5-hydroxymethylcytidine
  misc_difference 3892: note = n indicates cytidine, 5-methylcytidine, or 5-hydroxymethylcytidine
  misc_difference 3898: note = n indicates cytidine, 5-methylcytidine, or 5-hydroxymethylcytidine
  misc_difference 3899: note = n indicates cytidine, 5-methylcytidine, or 5-hydroxymethylcytidine
  misc_difference 3901: note = n indicates cytidine, 5-methylcytidine, or 5-hydroxymethylcytidine
  misc_difference 3903: note = n indicates cytidine, 5-methylcytidine, or 5-hydroxymethylcytidine
  misc_difference 3913: note = n indicates cytidine, 5-methylcytidine, or 5-hydroxymethylcytidine
  misc_difference 3921: note = n indicates cytidine, 5-methylcytidine, or 5-hydroxymethylcytidine
  misc_difference 3932: note = n indicates cytidine, 5-methylcytidine, or 5-hydroxymethylcytidine
  misc_difference 3941: note = n indicates cytidine, 5-methylcytidine, or 5-hydroxymethylcytidine
  misc_difference 3945: note = n indicates cytidine, 5-methylcytidine, or 5-hydroxymethylcytidine
  misc_difference 3947: note = n indicates cytidine, 5-methylcytidine, or 5-hydroxymethylcytidine
  misc_difference 3952: note = n indicates cytidine, 5-methylcytidine, or 5-hydroxymethylcytidine
  misc_difference 3953: note = n indicates cytidine, 5-methylcytidine, or 5-hydroxymethylcytidine
  misc_difference 3954: note = n indicates cytidine, 5-methylcytidine, or 5-hydroxymethylcytidine
  misc_difference 3958: note = n indicates cytidine, 5-methylcytidine, or 5-hydroxymethylcytidine
  misc_difference 3960: note = n indicates cytidine, 5-methylcytidine, or 5-hydroxymethylcytidine
  misc_difference 3962: note = n indicates cytidine, 5-methylcytidine, or 5-hydroxymethylcytidine
  misc_difference 3967: note = n indicates cytidine, 5-methylcytidine, or 5-hydroxymethylcytidine
  misc_difference 3971: note = n indicates cytidine, 5-methylcytidine, or 5-hydroxymethylcytidine
  misc_difference 3975: note = n indicates cytidine, 5-methylcytidine, or 5-hydroxymethylcytidine
  misc_difference 3979: note = n indicates cytidine, 5-methylcytidine, or 5-hydroxymethylcytidine
  misc_difference 3982: note = n indicates cytidine, 5-methylcytidine, or 5-hydroxymethylcytidine
  misc_difference 3985: note = n indicates cytidine, 5-methylcytidine, or 5-hydroxymethylcytidine
  misc_difference 3986: note = n indicates cytidine, 5-methylcytidine, or 5-hydroxymethylcytidine
  misc_difference 3991: note = n indicates cytidine, 5-methylcytidine, or 5-hydroxymethylcytidine
  misc_difference 3992: note = n indicates cytidine, 5-methylcytidine, or 5-hydroxymethylcytidine
  misc_difference 3995: note = n indicates cytidine, 5-methylcytidine, or 5-hydroxymethylcytidine
  misc_difference 4003: note = n indicates cytidine, 5-methylcytidine, or 5-hydroxymethylcytidine
  misc_difference 4009: note = n indicates cytidine, 5-methylcytidine, or 5-hydroxymethylcytidine
  misc_difference 4010: note = n indicates cytidine, 5-methylcytidine, or 5-hydroxymethylcytidine
  misc_difference 4014: note = n indicates cytidine, 5-methylcytidine, or 5-hydroxymethylcytidine
  misc_difference 4016: note = n indicates cytidine, 5-methylcytidine, or 5-hydroxymethylcytidine
  misc_difference 4017: note = n indicates cytidine, 5-methylcytidine, or 5-hydroxymethylcytidine
  misc_difference 4019: note = n indicates cytidine, 5-methylcytidine, or 5-hydroxymethylcytidine
  misc_difference 4024: note = n indicates cytidine, 5-methylcytidine, or 5-hydroxymethylcytidine
  misc_difference 4025: note = n indicates cytidine, 5-methylcytidine, or 5-hydroxymethylcytidine
  misc_difference 4033: note = n indicates cytidine, 5-methylcytidine, or 5-hydroxymethylcytidine
  misc_difference 4035: note = n indicates cytidine, 5-methylcytidine, or 5-hydroxymethylcytidine
  misc_difference 4036: note = n indicates cytidine, 5-methylcytidine, or 5-hydroxymethylcytidine
  misc_difference 4037: note = n indicates cytidine, 5-methylcytidine, or 5-hydroxymethylcytidine
  misc_difference 4039: note = n indicates cytidine, 5-methylcytidine, or 5-hydroxymethylcytidine
  misc_difference 4044: note = n indicates cytidine, 5-methylcytidine, or 5-hydroxymethylcytidine
  misc_difference 4053: note = n indicates cytidine, 5-methylcytidine, or 5-hydroxymethylcytidine
  misc_difference 4066: note = n indicates cytidine, 5-methylcytidine, or 5-hydroxymethylcytidine
  misc_difference 4067: note = n indicates cytidine, 5-methylcytidine, or 5-hydroxymethylcytidine
  misc_difference 4069: note = n indicates cytidine, 5-methylcytidine, or 5-hydroxymethylcytidine
  misc_difference 4072: note = n indicates cytidine, 5-methylcytidine, or 5-hydroxymethylcytidine
  misc_difference 4073: note = n indicates cytidine, 5-methylcytidine, or 5-hydroxymethylcytidine
  misc_difference 4075: note = n indicates cytidine, 5-methylcytidine, or 5-hydroxymethylcytidine
  misc_difference 4076: note = n indicates cytidine, 5-methylcytidine, or 5-hydroxymethylcytidine
  misc_difference 4096: note = n indicates cytidine, 5-methylcytidine, or 5-hydroxymethylcytidine
  misc_difference 4099: note = n indicates cytidine, 5-methylcytidine, or 5-hydroxymethylcytidine
  misc_difference 4103: note = n indicates cytidine, 5-methylcytidine, or 5-hydroxymethylcytidine
  misc_difference 4106: note = n indicates cytidine, 5-methylcytidine, or 5-hydroxymethylcytidine
  misc_difference 4113: note = n indicates cytidine, 5-methylcytidine, or 5-hydroxymethylcytidine
  misc_difference 4116: note = n indicates cytidine, 5-methylcytidine, or 5-hydroxymethylcytidine
  misc_difference 4117: note = n indicates cytidine, 5-methylcytidine, or 5-hydroxymethylcytidine
  misc_difference 4121: note = n indicates cytidine, 5-methylcytidine, or 5-hydroxymethylcytidine
  misc_difference 4133: note = n indicates cytidine, 5-methylcytidine, or 5-hydroxymethylcytidine
  misc_difference 4138: note = n indicates cytidine, 5-methylcytidine, or 5-hydroxymethylcytidine
  misc_difference 4140: note = n indicates cytidine, 5-methylcytidine, or 5-hydroxymethylcytidine
  misc_difference 4154: note = n indicates cytidine, 5-methylcytidine, or 5-hydroxymethylcytidine
  misc_difference 4155: note = n indicates cytidine, 5-methylcytidine, or 5-hydroxymethylcytidine
  misc_difference 4156: note = n indicates cytidine, 5-methylcytidine, or 5-hydroxymethylcytidine
  misc_difference 4163: note = n indicates cytidine, 5-methylcytidine, or 5-hydroxymethylcytidine
  misc_difference 4166: note = n indicates cytidine, 5-methylcytidine, or 5-hydroxymethylcytidine
  misc_difference 4173: note = n indicates cytidine, 5-methylcytidine, or 5-hydroxymethylcytidine
  misc_difference 4176: note = n indicates cytidine, 5-methylcytidine, or 5-hydroxymethylcytidine
  misc_difference 4177: note = n indicates cytidine, 5-methylcytidine, or 5-hydroxymethylcytidine
  misc_difference 4181: note = n indicates cytidine, 5-methylcytidine, or 5-hydroxymethylcytidine
  misc_difference 4195: note = n indicates cytidine, 5-methylcytidine, or 5-hydroxymethylcytidine
  misc_difference 4197: note = n indicates cytidine, 5-methylcytidine, or 5-hydroxymethylcytidine
  misc_difference 4200: note = n indicates cytidine, 5-methylcytidine, or 5-hydroxymethylcytidine
  misc_difference 4205: note = n indicates cytidine, 5-methylcytidine, or 5-hydroxymethylcytidine
  misc_difference 4213: note = n indicates cytidine, 5-methylcytidine, or 5-hydroxymethylcytidine
  misc_difference 4216: note = n indicates cytidine, 5-methylcytidine, or 5-hydroxymethylcytidine
  misc_difference 4221: note = n indicates cytidine, 5-methylcytidine, or 5-hydroxymethylcytidine
  misc_difference 4226: note = n indicates cytidine, 5-methylcytidine, or 5-hydroxymethylcytidine
  misc_difference 4230: note = n indicates cytidine, 5-methylcytidine, or 5-hydroxymethylcytidine
  misc_difference 4234: note = n indicates cytidine, 5-methylcytidine, or 5-hydroxymethylcytidine
  misc_difference 4235: note = n indicates cytidine, 5-methylcytidine, or 5-hydroxymethylcytidine
  misc_difference 4242: note = n indicates cytidine, 5-methylcytidine, or 5-hydroxymethylcytidine
  misc_difference 4243: note = n indicates cytidine, 5-methylcytidine, or 5-hydroxymethylcytidine
  misc_difference 4247: note = n indicates cytidine, 5-methylcytidine, or 5-hydroxymethylcytidine
  misc_difference 4250: note = n indicates cytidine, 5-methylcytidine, or 5-hydroxymethylcytidine
  misc_difference 4253: note = n indicates cytidine, 5-methylcytidine, or 5-hydroxymethylcytidine
  misc_difference 4261: note = n indicates cytidine, 5-methylcytidine, or 5-hydroxymethylcytidine
  misc_difference 4277: note = n indicates cytidine, 5-methylcytidine, or 5-hydroxymethylcytidine
  misc_difference 4281: note = n indicates cytidine, 5-methylcytidine, or 5-hydroxymethylcytidine
  misc_difference 4288: note = n indicates cytidine, 5-methylcytidine, or 5-hydroxymethylcytidine
  misc_difference 4294: note = n indicates cytidine, 5-methylcytidine, or 5-hydroxymethylcytidine
  misc_difference 4303: note = n indicates cytidine, 5-methylcytidine, or 5-hydroxymethylcytidine
  misc_difference 4304: note = n indicates cytidine, 5-methylcytidine, or 5-hydroxymethylcytidine
  misc_difference 4307: note = n indicates cytidine, 5-methylcytidine, or 5-hydroxymethylcytidine
  misc_difference 4309: note = n indicates cytidine, 5-methylcytidine, or 5-hydroxymethylcytidine
  misc_difference 4319: note = n indicates cytidine, 5-methylcytidine, or 5-hydroxymethylcytidine
  misc_difference 4322: note = n indicates cytidine, 5-methylcytidine, or 5-hydroxymethylcytidine
  misc_difference 4328: note = n indicates cytidine, 5-methylcytidine, or 5-hydroxymethylcytidine
  misc_difference 4334: note = n indicates cytidine, 5-methylcytidine, or 5-hydroxymethylcytidine
  misc_difference 4339: note = n indicates cytidine, 5-methylcytidine, or 5-hydroxymethylcytidine
  misc_difference 4345: note = n indicates cytidine, 5-methylcytidine, or 5-hydroxymethylcytidine
  misc_difference 4350: note = n indicates cytidine, 5-methylcytidine, or 5-hydroxymethylcytidine
  misc_difference 4351: note = n indicates cytidine, 5-methylcytidine, or 5-hydroxymethylcytidine
  misc_difference 4353: note = n indicates cytidine, 5-methylcytidine, or 5-hydroxymethylcytidine
  misc_difference 4360: note = n indicates cytidine, 5-methylcytidine, or 5-hydroxymethylcytidine
  misc_difference 4361: note = n indicates cytidine, 5-methylcytidine, or 5-hydroxymethylcytidine
  misc_difference 4363: note = n indicates cytidine, 5-methylcytidine, or 5-hydroxymethylcytidine
  misc_difference 4364: note = n indicates cytidine, 5-methylcytidine, or 5-hydroxymethylcytidine
  misc_difference 4367: note = n indicates cytidine, 5-methylcytidine, or 5-hydroxymethylcytidine
  misc_difference 4370: note = n indicates cytidine, 5-methylcytidine, or 5-hydroxymethylcytidine
  misc_difference 4375: note = n indicates cytidine, 5-methylcytidine, or 5-hydroxymethylcytidine
  misc_difference 4376: note = n indicates cytidine, 5-methylcytidine, or 5-hydroxymethylcytidine
  misc_difference 4382: note = n indicates cytidine, 5-methylcytidine, or 5-hydroxymethylcytidine
  misc_difference 4389: note = n indicates cytidine, 5-methylcytidine, or 5-hydroxymethylcytidine
  misc_difference 4392: note = n indicates cytidine, 5-methylcytidine, or 5-hydroxymethylcytidine
  misc_difference 4396: note = n indicates cytidine, 5-methylcytidine, or 5-hydroxymethylcytidine
  misc_difference 4397: note = n indicates cytidine, 5-methylcytidine, or 5-hydroxymethylcytidine
  misc_difference 4398: note = n indicates cytidine, 5-methylcytidine, or 5-hydroxymethylcytidine
  misc_difference 4402: note = n indicates cytidine, 5-methylcytidine, or 5-hydroxymethylcytidine
  misc_difference 4409: note = n indicates cytidine, 5-methylcytidine, or 5-hydroxymethylcytidine
  misc_difference 4410: note = n indicates cytidine, 5-methylcytidine, or 5-hydroxymethylcytidine
  misc_difference 4416: note = n indicates cytidine, 5-methylcytidine, or 5-hydroxymethylcytidine
  misc_difference 4420: note = n indicates cytidine, 5-methylcytidine, or 5-hydroxymethylcytidine
  misc_difference 4423: note = n indicates cytidine, 5-methylcytidine, or 5-hydroxymethylcytidine
  misc_difference 4430: note = n indicates cytidine, 5-methylcytidine, or 5-hydroxymethylcytidine
  misc_difference 4432: note = n indicates cytidine, 5-methylcytidine, or 5-hydroxymethylcytidine
  misc_difference 4433: note = n indicates cytidine, 5-methylcytidine, or 5-hydroxymethylcytidine
  misc_difference 4435: note = n indicates cytidine, 5-methylcytidine, or 5-hydroxymethylcytidine
  misc_difference 4441: note = n indicates cytidine, 5-methylcytidine, or 5-hydroxymethylcytidine
  misc_difference 4450: note = n indicates cytidine, 5-methylcytidine, or 5-hydroxymethylcytidine
  misc_difference 4451: note = n indicates cytidine, 5-methylcytidine, or 5-hydroxymethylcytidine
  misc_difference 4457: note = n indicates cytidine, 5-methylcytidine, or 5-hydroxymethylcytidine
  misc_difference 4460: note = n indicates cytidine, 5-methylcytidine, or 5-hydroxymethylcytidine
  misc_difference 4466: note = n indicates cytidine, 5-methylcytidine, or 5-hydroxymethylcytidine
  misc_difference 4483: note = n indicates cytidine, 5-methylcytidine, or 5-hydroxymethylcytidine
  misc_difference 4485: note = n indicates cytidine, 5-methylcytidine, or 5-hydroxymethylcytidine
  misc_difference 4487: note = n indicates cytidine, 5-methylcytidine, or 5-hydroxymethylcytidine
  misc_difference 4495: note = n indicates cytidine, 5-methylcytidine, or 5-hydroxymethylcytidine
  misc_difference 4501: note = n indicates cytidine, 5-methylcytidine, or 5-hydroxymethylcytidine
  misc_difference 4513: note = n indicates cytidine, 5-methylcytidine, or 5-hydroxymethylcytidine
  misc_difference 4529: note = n indicates cytidine, 5-methylcytidine, or 5-hydroxymethylcytidine
  misc_difference 4534: note = n indicates cytidine, 5-methylcytidine, or 5-hydroxymethylcytidine
  misc_difference 4535: note = n indicates cytidine, 5-methylcytidine, or 5-hydroxymethylcytidine
  misc_difference 4538: note = n indicates cytidine, 5-methylcytidine, or 5-hydroxymethylcytidine
  misc_difference 4541: note = n indicates cytidine, 5-methylcytidine, or 5-hydroxymethylcytidine
  misc_difference 4543: note = n indicates cytidine, 5-methylcytidine, or 5-hydroxymethylcytidine
  misc_difference 4546: note = n indicates cytidine, 5-methylcytidine, or 5-hydroxymethylcytidine
  misc_difference 4552: note = n indicates cytidine, 5-methylcytidine, or 5-hydroxymethylcytidine
  misc_difference 4557: note = n indicates cytidine, 5-methylcytidine, or 5-hydroxymethylcytidine
  misc_difference 4558: note = n indicates cytidine, 5-methylcytidine, or 5-hydroxymethylcytidine
  misc_difference 4564: note = n indicates cytidine, 5-methylcytidine, or 5-hydroxymethylcytidine
  misc_difference 4569: note = n indicates cytidine, 5-methylcytidine, or 5-hydroxymethylcytidine
  misc_difference 4581: note = n indicates cytidine, 5-methylcytidine, or 5-hydroxymethylcytidine
  misc_difference 4584: note = n indicates cytidine, 5-methylcytidine, or 5-hydroxymethylcytidine
  misc_difference 4585: note = n indicates cytidine, 5-methylcytidine, or 5-hydroxymethylcytidine
  misc_difference 4594: note = n indicates cytidine, 5-methylcytidine, or 5-hydroxymethylcytidine
  misc_difference 4600: note = n indicates cytidine, 5-methylcytidine, or 5-hydroxymethylcytidine
  misc_difference 4613: note = n indicates cytidine, 5-methylcytidine, or 5-hydroxymethylcytidine
  misc_difference 4616: note = n indicates cytidine, 5-methylcytidine, or 5-hydroxymethylcytidine
  misc_difference 4619: note = n indicates cytidine, 5-methylcytidine, or 5-hydroxymethylcytidine
  misc_difference 4621: note = n indicates cytidine, 5-methylcytidine, or 5-hydroxymethylcytidine
  misc_difference 4625: note = n indicates cytidine, 5-methylcytidine, or 5-hydroxymethylcytidine
  misc_difference 4631: note = n indicates cytidine, 5-methylcytidine, or 5-hydroxymethylcytidine
  misc_difference 4636: note = n indicates cytidine, 5-methylcytidine, or 5-hydroxymethylcytidine
  misc_difference 4640: note = n indicates cytidine, 5-methylcytidine, or 5-hydroxymethylcytidine
  misc_difference 4642: note = n indicates cytidine, 5-methylcytidine, or 5-hydroxymethylcytidine
  misc_difference 4657: note = n indicates cytidine, 5-methylcytidine, or 5-hydroxymethylcytidine
  misc_difference 4658: note = n indicates cytidine, 5-methylcytidine, or 5-hydroxymethylcytidine
  misc_difference 4665: note = n indicates cytidine, 5-methylcytidine, or 5-hydroxymethylcytidine
  misc_difference 4667: note = n indicates cytidine, 5-methylcytidine, or 5-hydroxymethylcytidine
  misc_difference 4668: note = n indicates cytidine, 5-methylcytidine, or 5-hydroxymethylcytidine
  misc_difference 4672: note = n indicates cytidine, 5-methylcytidine, or 5-hydroxymethylcytidine
  misc_difference 4675: note = n indicates cytidine, 5-methylcytidine, or 5-hydroxymethylcytidine
  misc_difference 4676: note = n indicates cytidine, 5-methylcytidine, or 5-hydroxymethylcytidine
  misc_difference 4687: note = n indicates cytidine, 5-methylcytidine, or 5-hydroxymethylcytidine
  misc_difference 4699: note = n indicates cytidine, 5-methylcytidine, or 5-hydroxymethylcytidine
  misc_difference 4700: note = n indicates cytidine, 5-methylcytidine, or 5-hydroxymethylcytidine
  misc_difference 4707: note = n indicates cytidine, 5-methylcytidine, or 5-hydroxymethylcytidine
  misc_difference 4708: note = n indicates cytidine, 5-methylcytidine, or 5-hydroxymethylcytidine
  misc_difference 4709: note = n indicates cytidine, 5-methylcytidine, or 5-hydroxymethylcytidine
  misc_difference 4714: note = n indicates cytidine, 5-methylcytidine, or 5-hydroxymethylcytidine
  misc_difference 4717: note = n indicates cytidine, 5-methylcytidine, or 5-hydroxymethylcytidine
  misc_difference 4723: note = n indicates cytidine, 5-methylcytidine, or 5-hydroxymethylcytidine
  misc_difference 4724: note = n indicates cytidine, 5-methylcytidine, or 5-hydroxymethylcytidine
  misc_difference 4731: note = n indicates cytidine, 5-methylcytidine, or 5-hydroxymethylcytidine
  misc_difference 4739: note = n indicates cytidine, 5-methylcytidine, or 5-hydroxymethylcytidine
  misc_difference 4748: note = n indicates cytidine, 5-methylcytidine, or 5-hydroxymethylcytidine
  misc_difference 4749: note = n indicates cytidine, 5-methylcytidine, or 5-hydroxymethylcytidine
  misc_difference 4751: note = n indicates cytidine, 5-methylcytidine, or 5-hydroxymethylcytidine
  misc_difference 4760: note = n indicates cytidine, 5-methylcytidine, or 5-hydroxymethylcytidine
  misc_difference 4766: note = n indicates cytidine, 5-methylcytidine, or 5-hydroxymethylcytidine
  misc_difference 4777: note = n indicates cytidine, 5-methylcytidine, or 5-hydroxymethylcytidine
  misc_difference 4784: note = n indicates cytidine, 5-methylcytidine, or 5-hydroxymethylcytidine
  misc_difference 4785: note = n indicates cytidine, 5-methylcytidine, or 5-hydroxymethylcytidine
  misc_difference 4786: note = n indicates cytidine, 5-methylcytidine, or 5-hydroxymethylcytidine
  misc_difference 4787: note = n indicates cytidine, 5-methylcytidine, or 5-hydroxymethylcytidine
  misc_difference 4790: note = n indicates cytidine, 5-methylcytidine, or 5-hydroxymethylcytidine
  misc_difference 4798: note = n indicates cytidine, 5-methylcytidine, or 5-hydroxymethylcytidine
  misc_difference 4804: note = n indicates cytidine, 5-methylcytidine, or 5-hydroxymethylcytidine
  misc_difference 4805: note = n indicates cytidine, 5-methylcytidine, or 5-hydroxymethylcytidine
  misc_difference 4807: note = n indicates cytidine, 5-methylcytidine, or 5-hydroxymethylcytidine
  misc_difference 4808: note = n indicates cytidine, 5-methylcytidine, or 5-hydroxymethylcytidine
  misc_difference 4810: note = n indicates cytidine, 5-methylcytidine, or 5-hydroxymethylcytidine
  misc_difference 4812: note = n indicates cytidine, 5-methylcytidine, or 5-hydroxymethylcytidine
  misc_difference 4813: note = n indicates cytidine, 5-methylcytidine, or 5-hydroxymethylcytidine
  misc_difference 4815: note = n indicates cytidine, 5-methylcytidine, or 5-hydroxymethylcytidine
  misc_difference 4816: note = n indicates cytidine, 5-methylcytidine, or 5-hydroxymethylcytidine
  misc_difference 4820: note = n indicates cytidine, 5-methylcytidine, or 5-hydroxymethylcytidine
  misc_difference 4822: note = n indicates cytidine, 5-methylcytidine, or 5-hydroxymethylcytidine
  misc_difference 4824: note = n indicates cytidine, 5-methylcytidine, or 5-hydroxymethylcytidine
  misc_difference 4827: note = n indicates cytidine, 5-methylcytidine, or 5-hydroxymethylcytidine
  misc_difference 4828: note = n indicates cytidine, 5-methylcytidine, or 5-hydroxymethylcytidine
  misc_difference 4832: note = n indicates cytidine, 5-methylcytidine, or 5-hydroxymethylcytidine
  misc_difference 4838: note = n indicates cytidine, 5-methylcytidine, or 5-hydroxymethylcytidine
  misc_difference 4841: note = n indicates cytidine, 5-methylcytidine, or 5-hydroxymethylcytidine
  misc_difference 4842: note = n indicates cytidine, 5-methylcytidine, or 5-hydroxymethylcytidine
  misc_difference 4846: note = n indicates cytidine, 5-methylcytidine, or 5-hydroxymethylcytidine
  misc_difference 4847: note = n indicates cytidine, 5-methylcytidine, or 5-hydroxymethylcytidine
  misc_difference 4852: note = n indicates cytidine, 5-methylcytidine, or 5-hydroxymethylcytidine
  misc_difference 4854: note = n indicates cytidine, 5-methylcytidine, or 5-hydroxymethylcytidine
  misc_difference 4855: note = n indicates cytidine, 5-methylcytidine, or 5-hydroxymethylcytidine
  misc_difference 4866: note = n indicates cytidine, 5-methylcytidine, or 5-hydroxymethylcytidine
  misc_difference 4869: note = n indicates cytidine, 5-methylcytidine, or 5-hydroxymethylcytidine
  misc_difference 4871: note = n indicates cytidine, 5-methylcytidine, or 5-hydroxymethylcytidine
  misc_difference 4872: note = n indicates cytidine, 5-methylcytidine, or 5-hydroxymethylcytidine
  misc_difference 4879: note = n indicates cytidine, 5-methylcytidine, or 5-hydroxymethylcytidine
  misc_difference 4880: note = n indicates cytidine, 5-methylcytidine, or 5-hydroxymethylcytidine
  misc_difference 4882: note = n indicates cytidine, 5-methylcytidine, or 5-hydroxymethylcytidine
  misc_difference 4884: note = n indicates cytidine, 5-methylcytidine, or 5-hydroxymethylcytidine
  misc_difference 4887: note = n indicates cytidine, 5-methylcytidine, or 5-hydroxymethylcytidine
  misc_difference 4888: note = n indicates cytidine, 5-methylcytidine, or 5-hydroxymethylcytidine
  misc_difference 4893: note = n indicates cytidine, 5-methylcytidine, or 5-hydroxymethylcytidine
  misc_difference 4900: note = n indicates cytidine, 5-methylcytidine, or 5-hydroxymethylcytidine
  misc_difference 4907: note = n indicates cytidine, 5-methylcytidine, or 5-hydroxymethylcytidine
  misc_difference 4909: note = n indicates cytidine, 5-methylcytidine, or 5-hydroxymethylcytidine
  misc_difference 4912: note = n indicates cytidine, 5-methylcytidine, or 5-hydroxymethylcytidine
  misc_difference 4913: note = n indicates cytidine, 5-methylcytidine, or 5-hydroxymethylcytidine
  misc_difference 4917: note = n indicates cytidine, 5-methylcytidine, or 5-hydroxymethylcytidine
  misc_difference 4918: note = n indicates cytidine, 5-methylcytidine, or 5-hydroxymethylcytidine
  misc_difference 4923: note = n indicates cytidine, 5-methylcytidine, or 5-hydroxymethylcytidine
  misc_difference 4924: note = n indicates cytidine, 5-methylcytidine, or 5-hydroxymethylcytidine
  misc_difference 4937: note = n indicates cytidine, 5-methylcytidine, or 5-hydroxymethylcytidine
  misc_difference 4939: note = n indicates cytidine, 5-methylcytidine, or 5-hydroxymethylcytidine
  misc_difference 4947: note = n indicates cytidine, 5-methylcytidine, or 5-hydroxymethylcytidine
  misc_difference 4955: note = n indicates cytidine, 5-methylcytidine, or 5-hydroxymethylcytidine
  misc_difference 4956: note = n indicates cytidine, 5-methylcytidine, or 5-hydroxymethylcytidine
  misc_difference 4961: note = n indicates cytidine, 5-methylcytidine, or 5-hydroxymethylcytidine
  misc_difference 4963: note = n indicates cytidine, 5-methylcytidine, or 5-hydroxymethylcytidine
  misc_difference 4964: note = n indicates cytidine, 5-methylcytidine, or 5-hydroxymethylcytidine
  misc_difference 4965: note = n indicates cytidine, 5-methylcytidine, or 5-hydroxymethylcytidine
  misc_difference 4968: note = n indicates cytidine, 5-methylcytidine, or 5-hydroxymethylcytidine
  misc_difference 4969: note = n indicates cytidine, 5-methylcytidine, or 5-hydroxymethylcytidine
  misc_difference 4979: note = n indicates cytidine, 5-methylcytidine, or 5-hydroxymethylcytidine
  misc_difference 4981: note = n indicates cytidine, 5-methylcytidine, or 5-hydroxymethylcytidine
  misc_difference 4983: note = n indicates cytidine, 5-methylcytidine, or 5-hydroxymethylcytidine
  misc_difference 4984: note = n indicates cytidine, 5-methylcytidine, or 5-hydroxymethylcytidine
  misc_difference 4992: note = n indicates cytidine, 5-methylcytidine, or 5-hydroxymethylcytidine
  misc_difference 4993: note = n indicates cytidine, 5-methylcytidine, or 5-hydroxymethylcytidine
  misc_difference 4996: note = n indicates cytidine, 5-methylcytidine, or 5-hydroxymethylcytidine
  misc_difference 5004: note = n indicates cytidine, 5-methylcytidine, or 5-hydroxymethylcytidine
  misc_difference 5007: note = n indicates cytidine, 5-methylcytidine, or 5-hydroxymethylcytidine
  misc_difference 5008: note = n indicates cytidine, 5-methylcytidine, or 5-hydroxymethylcytidine
  misc_difference 5019: note = n indicates cytidine, 5-methylcytidine, or 5-hydroxymethylcytidine
  misc_difference 5021: note = n indicates cytidine, 5-methylcytidine, or 5-hydroxymethylcytidine
  misc_difference 5029: note = n indicates cytidine, 5-methylcytidine, or 5-hydroxymethylcytidine
  misc_difference 5031: note = n indicates cytidine, 5-methylcytidine, or 5-hydroxymethylcytidine
  misc_difference 5032: note = n indicates cytidine, 5-methylcytidine, or 5-hydroxymethylcytidine
  misc_difference 5034: note = n indicates cytidine, 5-methylcytidine, or 5-hydroxymethylcytidine
  misc_difference 5035: note = n indicates cytidine, 5-methylcytidine, or 5-hydroxymethylcytidine
  misc_difference 5042: note = n indicates cytidine, 5-methylcytidine, or 5-hydroxymethylcytidine
  misc_difference 5047: note = n indicates cytidine, 5-methylcytidine, or 5-hydroxymethylcytidine
  misc_difference 5049: note = n indicates cytidine, 5-methylcytidine, or 5-hydroxymethylcytidine
  misc_difference 5050: note = n indicates cytidine, 5-methylcytidine, or 5-hydroxymethylcytidine
  misc_difference 5055: note = n indicates cytidine, 5-methylcytidine, or 5-hydroxymethylcytidine
  misc_difference 5056: note = n indicates cytidine, 5-methylcytidine, or 5-hydroxymethylcytidine
  misc_difference 5059: note = n indicates cytidine, 5-methylcytidine, or 5-hydroxymethylcytidine
  misc_difference 5062: note = n indicates cytidine, 5-methylcytidine, or 5-hydroxymethylcytidine
  misc_difference 5069: note = n indicates cytidine, 5-methylcytidine, or 5-hydroxymethylcytidine
  misc_difference 5070: note = n indicates cytidine, 5-methylcytidine, or 5-hydroxymethylcytidine
  misc_difference 5074: note = n indicates cytidine, 5-methylcytidine, or 5-hydroxymethylcytidine
  misc_difference 5075: note = n indicates cytidine, 5-methylcytidine, or 5-hydroxymethylcytidine
  misc_difference 5077: note = n indicates cytidine, 5-methylcytidine, or 5-hydroxymethylcytidine
  misc_difference 5086: note = n indicates cytidine, 5-methylcytidine, or 5-hydroxymethylcytidine
  misc_difference 5088: note = n indicates cytidine, 5-methylcytidine, or 5-hydroxymethylcytidine
  misc_difference 5089: note = n indicates cytidine, 5-methylcytidine, or 5-hydroxymethylcytidine
  misc_difference 5094: note = n indicates cytidine, 5-methylcytidine, or 5-hydroxymethylcytidine
  misc_difference 5097: note = n indicates cytidine, 5-methylcytidine, or 5-hydroxymethylcytidine
  misc_difference 5098: note = n indicates cytidine, 5-methylcytidine, or 5-hydroxymethylcytidine
  misc_difference 5100: note = n indicates cytidine, 5-methylcytidine, or 5-hydroxymethylcytidine
  misc_difference 5101: note = n indicates cytidine, 5-methylcytidine, or 5-hydroxymethylcytidine
  misc_difference 5103: note = n indicates cytidine, 5-methylcytidine, or 5-hydroxymethylcytidine
  misc_difference 5110: note = n indicates cytidine, 5-methylcytidine, or 5-hydroxymethylcytidine
  misc_difference 5111: note = n indicates cytidine, 5-methylcytidine, or 5-hydroxymethylcytidine
  misc_difference 5122: note = n indicates cytidine, 5-methylcytidine, or 5-hydroxymethylcytidine
  misc_difference 5123: note = n indicates cytidine, 5-methylcytidine, or 5-hydroxymethylcytidine
  misc_difference 5128: note = n indicates cytidine, 5-methylcytidine, or 5-hydroxymethylcytidine
  misc_difference 5134: note = n indicates cytidine, 5-methylcytidine, or 5-hydroxymethylcytidine
  misc_difference 5136: note = n indicates cytidine, 5-methylcytidine, or 5-hydroxymethylcytidine
  misc_difference 5137: note = n indicates cytidine, 5-methylcytidine, or 5-hydroxymethylcytidine
  misc_difference 5142: note = n indicates cytidine, 5-methylcytidine, or 5-hydroxymethylcytidine
  misc_difference 5143: note = n indicates cytidine, 5-methylcytidine, or 5-hydroxymethylcytidine
  misc_difference 5147: note = n indicates cytidine, 5-methylcytidine, or 5-hydroxymethylcytidine
  misc_difference 5150: note = n indicates cytidine, 5-methylcytidine, or 5-hydroxymethylcytidine
  misc_difference 5153: note = n indicates cytidine, 5-methylcytidine, or 5-hydroxymethylcytidine
  misc_difference 5174: note = n indicates cytidine, 5-methylcytidine, or 5-hydroxymethylcytidine
  misc_difference 5184: note = n indicates cytidine, 5-methylcytidine, or 5-hydroxymethylcytidine
  misc_difference 5188: note = n indicates cytidine, 5-methylcytidine, or 5-hydroxymethylcytidine
  misc_difference 5195: note = n indicates cytidine, 5-methylcytidine, or 5-hydroxymethylcytidine
  misc_difference 5196: note = n indicates cytidine, 5-methylcytidine, or 5-hydroxymethylcytidine
  misc_difference 5197: note = n indicates cytidine, 5-methylcytidine, or 5-hydroxymethylcytidine
  misc_difference 5200: note = n indicates cytidine, 5-methylcytidine, or 5-hydroxymethylcytidine
  misc_difference 5201: note = n indicates cytidine, 5-methylcytidine, or 5-hydroxymethylcytidine
  misc_difference 5202: note = n indicates cytidine, 5-methylcytidine, or 5-hydroxymethylcytidine
  misc_difference 5204: note = n indicates cytidine, 5-methylcytidine, or 5-hydroxymethylcytidine
  misc_difference 5205: note = n indicates cytidine, 5-methylcytidine, or 5-hydroxymethylcytidine
  misc_difference 5211: note = n indicates cytidine, 5-methylcytidine, or 5-hydroxymethylcytidine
  misc_difference 5214: note = n indicates cytidine, 5-methylcytidine, or 5-hydroxymethylcytidine
  misc_difference 5219: note = n indicates cytidine, 5-methylcytidine, or 5-hydroxymethylcytidine
  misc_difference 5224: note = n indicates cytidine, 5-methylcytidine, or 5-hydroxymethylcytidine
  misc_difference 5228: note = n indicates cytidine, 5-methylcytidine, or 5-hydroxymethylcytidine
  misc_difference 5232: note = n indicates cytidine, 5-methylcytidine, or 5-hydroxymethylcytidine
  misc_difference 5234: note = n indicates cytidine, 5-methylcytidine, or 5-hydroxymethylcytidine
  misc_difference 5238: note = n indicates cytidine, 5-methylcytidine, or 5-hydroxymethylcytidine
  misc_difference 5239: note = n indicates cytidine, 5-methylcytidine, or 5-hydroxymethylcytidine
  misc_difference 5241: note = n indicates cytidine, 5-methylcytidine, or 5-hydroxymethylcytidine
  misc_difference 5242: note = n indicates cytidine, 5-methylcytidine, or 5-hydroxymethylcytidine
  misc_difference 5243: note = n indicates cytidine, 5-methylcytidine, or 5-hydroxymethylcytidine
  misc_difference 5245: note = n indicates cytidine, 5-methylcytidine, or 5-hydroxymethylcytidine
  misc_difference 5251: note = n indicates cytidine, 5-methylcytidine, or 5-hydroxymethylcytidine
  misc_difference 5255: note = n indicates cytidine, 5-methylcytidine, or 5-hydroxymethylcytidine
  misc_difference 5257: note = n indicates cytidine, 5-methylcytidine, or 5-hydroxymethylcytidine
  misc_difference 5260: note = n indicates cytidine, 5-methylcytidine, or 5-hydroxymethylcytidine
  misc_difference 5261: note = n indicates cytidine, 5-methylcytidine, or 5-hydroxymethylcytidine
  misc_difference 5266: note = n indicates cytidine, 5-methylcytidine, or 5-hydroxymethylcytidine
  misc_difference 5267: note = n indicates cytidine, 5-methylcytidine, or 5-hydroxymethylcytidine
  misc_difference 5271: note = n indicates cytidine, 5-methylcytidine, or 5-hydroxymethylcytidine
  misc_difference 5272: note = n indicates cytidine, 5-methylcytidine, or 5-hydroxymethylcytidine
  misc_difference 5274: note = n indicates cytidine, 5-methylcytidine, or 5-hydroxymethylcytidine
  misc_difference 5278: note = n indicates cytidine, 5-methylcytidine, or 5-hydroxymethylcytidine
  misc_difference 5281: note = n indicates cytidine, 5-methylcytidine, or 5-hydroxymethylcytidine
  misc_difference 5282: note = n indicates cytidine, 5-methylcytidine, or 5-hydroxymethylcytidine
  misc_difference 5285: note = n indicates cytidine, 5-methylcytidine, or 5-hydroxymethylcytidine
  misc_difference 5297: note = n indicates cytidine, 5-methylcytidine, or 5-hydroxymethylcytidine
  misc_difference 5305: note = n indicates cytidine, 5-methylcytidine, or 5-hydroxymethylcytidine
  misc_difference 5306: note = n indicates cytidine, 5-methylcytidine, or 5-hydroxymethylcytidine
  misc_difference 5310: note = n indicates cytidine, 5-methylcytidine, or 5-hydroxymethylcytidine
  misc_difference 5315: note = n indicates cytidine, 5-methylcytidine, or 5-hydroxymethylcytidine
  misc_difference 5317: note = n indicates cytidine, 5-methylcytidine, or 5-hydroxymethylcytidine
  misc_difference 5318: note = n indicates cytidine, 5-methylcytidine, or 5-hydroxymethylcytidine
  misc_difference 5319: note = n indicates cytidine, 5-methylcytidine, or 5-hydroxymethylcytidine
  misc_difference 5329: note = n indicates cytidine, 5-methylcytidine, or 5-hydroxymethylcytidine
  misc_difference 5333: note = n indicates cytidine, 5-methylcytidine, or 5-hydroxymethylcytidine
  misc_difference 5338: note = n indicates cytidine, 5-methylcytidine, or 5-hydroxymethylcytidine
  misc_difference 5339: note = n indicates cytidine, 5-methylcytidine, or 5-hydroxymethylcytidine
  misc_difference 5342: note = n indicates cytidine, 5-methylcytidine, or 5-hydroxymethylcytidine
  misc_difference 5347: note = n indicates cytidine, 5-methylcytidine, or 5-hydroxymethylcytidine
  misc_difference 5350: note = n indicates cytidine, 5-methylcytidine, or 5-hydroxymethylcytidine
  misc_difference 5353: note = n indicates cytidine, 5-methylcytidine, or 5-hydroxymethylcytidine
  misc_difference 5356: note = n indicates cytidine, 5-methylcytidine, or 5-hydroxymethylcytidine
  misc_difference 5357: note = n indicates cytidine, 5-methylcytidine, or 5-hydroxymethylcytidine
  misc_difference 5362: note = n indicates cytidine, 5-methylcytidine, or 5-hydroxymethylcytidine
  misc_difference 5366: note = n indicates cytidine, 5-methylcytidine, or 5-hydroxymethylcytidine
  misc_difference 5368: note = n indicates cytidine, 5-methylcytidine, or 5-hydroxymethylcytidine
  misc_difference 5372: note = n indicates cytidine, 5-methylcytidine, or 5-hydroxymethylcytidine
  misc_difference 5375: note = n indicates cytidine, 5-methylcytidine, or 5-hydroxymethylcytidine
  misc_difference 5377: note = n indicates cytidine, 5-methylcytidine, or 5-hydroxymethylcytidine
  misc_difference 5394: note = n indicates cytidine, 5-methylcytidine, or 5-hydroxymethylcytidine
  misc_difference 5398: note = n indicates cytidine, 5-methylcytidine, or 5-hydroxymethylcytidine
  misc_difference 5400: note = n indicates cytidine, 5-methylcytidine, or 5-hydroxymethylcytidine
  misc_difference 5403: note = n indicates cytidine, 5-methylcytidine, or 5-hydroxymethylcytidine
  misc_difference 5404: note = n indicates cytidine, 5-methylcytidine, or 5-hydroxymethylcytidine
  misc_difference 5409: note = n indicates cytidine, 5-methylcytidine, or 5-hydroxymethylcytidine
  misc_difference 5410: note = n indicates cytidine, 5-methylcytidine, or 5-hydroxymethylcytidine
  misc_difference 5413: note = n indicates cytidine, 5-methylcytidine, or 5-hydroxymethylcytidine
  misc_difference 5415: note = n indicates cytidine, 5-methylcytidine, or 5-hydroxymethylcytidine
  misc_difference 5416: note = n indicates cytidine, 5-methylcytidine, or 5-hydroxymethylcytidine
  misc_difference 5418: note = n indicates cytidine, 5-methylcytidine, or 5-hydroxymethylcytidine
  misc_difference 5422: note = n indicates cytidine, 5-methylcytidine, or 5-hydroxymethylcytidine
  misc_difference 5429: note = n indicates cytidine, 5-methylcytidine, or 5-hydroxymethylcytidine
  misc_difference 5435: note = n indicates cytidine, 5-methylcytidine, or 5-hydroxymethylcytidine
  misc_difference 5436: note = n indicates cytidine, 5-methylcytidine, or 5-hydroxymethylcytidine
  misc_difference 5437: note = n indicates cytidine, 5-methylcytidine, or 5-hydroxymethylcytidine
  misc_difference 5439: note = n indicates cytidine, 5-methylcytidine, or 5-hydroxymethylcytidine
  misc_difference 5440: note = n indicates cytidine, 5-methylcytidine, or 5-hydroxymethylcytidine
  misc_difference 5442: note = n indicates cytidine, 5-methylcytidine, or 5-hydroxymethylcytidine
  misc_difference 5445: note = n indicates cytidine, 5-methylcytidine, or 5-hydroxymethylcytidine
  misc_difference 5446: note = n indicates cytidine, 5-methylcytidine, or 5-hydroxymethylcytidine
  misc_difference 5447: note = n indicates cytidine, 5-methylcytidine, or 5-hydroxymethylcytidine
  misc_difference 5449: note = n indicates cytidine, 5-methylcytidine, or 5-hydroxymethylcytidine
  misc_difference 5451: note = n indicates cytidine, 5-methylcytidine, or 5-hydroxymethylcytidine
  misc_difference 5452: note = n indicates cytidine, 5-methylcytidine, or 5-hydroxymethylcytidine
  misc_difference 5454: note = n indicates cytidine, 5-methylcytidine, or 5-hydroxymethylcytidine
  misc_difference 5456: note = n indicates cytidine, 5-methylcytidine, or 5-hydroxymethylcytidine
  misc_difference 5458: note = n indicates cytidine, 5-methylcytidine, or 5-hydroxymethylcytidine
  misc_difference 5464: note = n indicates cytidine, 5-methylcytidine, or 5-hydroxymethylcytidine
  misc_difference 5466: note = n indicates cytidine, 5-methylcytidine, or 5-hydroxymethylcytidine
  misc_difference 5467: note = n indicates cytidine, 5-methylcytidine, or 5-hydroxymethylcytidine
  misc_difference 5470: note = n indicates cytidine, 5-methylcytidine, or 5-hydroxymethylcytidine
  misc_difference 5472: note = n indicates cytidine, 5-methylcytidine, or 5-hydroxymethylcytidine
  misc_difference 5476: note = n indicates cytidine, 5-methylcytidine, or 5-hydroxymethylcytidine
  misc_difference 5478: note = n indicates cytidine, 5-methylcytidine, or 5-hydroxymethylcytidine
  misc_difference 5479: note = n indicates cytidine, 5-methylcytidine, or 5-hydroxymethylcytidine
  misc_difference 5480: note = n indicates cytidine, 5-methylcytidine, or 5-hydroxymethylcytidine
  misc_difference 5483: note = n indicates cytidine, 5-methylcytidine, or 5-hydroxymethylcytidine
  misc_difference 5488: note = n indicates cytidine, 5-methylcytidine, or 5-hydroxymethylcytidine
  misc_difference 5489: note = n indicates cytidine, 5-methylcytidine, or 5-hydroxymethylcytidine
  misc_difference 5492: note = n indicates cytidine, 5-methylcytidine, or 5-hydroxymethylcytidine
  misc_difference 5494: note = n indicates cytidine, 5-methylcytidine, or 5-hydroxymethylcytidine
  misc_difference 5500: note = n indicates cytidine, 5-methylcytidine, or 5-hydroxymethylcytidine
  misc_difference 5501: note = n indicates cytidine, 5-methylcytidine, or 5-hydroxymethylcytidine
  misc_difference 5504: note = n indicates cytidine, 5-methylcytidine, or 5-hydroxymethylcytidine
  misc_difference 5505: note = n indicates cytidine, 5-methylcytidine, or 5-hydroxymethylcytidine
  misc_difference 5512: note = n indicates cytidine, 5-methylcytidine, or 5-hydroxymethylcytidine
  misc_difference 5513: note = n indicates cytidine, 5-methylcytidine, or 5-hydroxymethylcytidine
  misc_difference 5515: note = n indicates cytidine, 5-methylcytidine, or 5-hydroxymethylcytidine
  misc_difference 5516: note = n indicates cytidine, 5-methylcytidine, or 5-hydroxymethylcytidine
  misc_difference 5517: note = n indicates cytidine, 5-methylcytidine, or 5-hydroxymethylcytidine
  misc_difference 5518: note = n indicates cytidine, 5-methylcytidine, or 5-hydroxymethylcytidine
  misc_difference 5520: note = n indicates cytidine, 5-methylcytidine, or 5-hydroxymethylcytidine
  misc_difference 5521: note = n indicates cytidine, 5-methylcytidine, or 5-hydroxymethylcytidine
  misc_difference 5525: note = n indicates cytidine, 5-methylcytidine, or 5-hydroxymethylcytidine
  misc_difference 5540: note = n indicates cytidine, 5-methylcytidine, or 5-hydroxymethylcytidine
  misc_difference 5542: note = n indicates cytidine, 5-methylcytidine, or 5-hydroxymethylcytidine
  misc_difference 5553: note = n indicates cytidine, 5-methylcytidine, or 5-hydroxymethylcytidine
  misc_difference 5555: note = n indicates cytidine, 5-methylcytidine, or 5-hydroxymethylcytidine
  misc_difference 5560: note = n indicates cytidine, 5-methylcytidine, or 5-hydroxymethylcytidine
  misc_difference 5562: note = n indicates cytidine, 5-methylcytidine, or 5-hydroxymethylcytidine
  misc_difference 5566: note = n indicates cytidine, 5-methylcytidine, or 5-hydroxymethylcytidine
  misc_difference 5567: note = n indicates cytidine, 5-methylcytidine, or 5-hydroxymethylcytidine
  misc_difference 5568: note = n indicates cytidine, 5-methylcytidine, or 5-hydroxymethylcytidine
  misc_difference 5569: note = n indicates cytidine, 5-methylcytidine, or 5-hydroxymethylcytidine
  misc_difference 5572: note = n indicates cytidine, 5-methylcytidine, or 5-hydroxymethylcytidine
  misc_difference 5574: note = n indicates cytidine, 5-methylcytidine, or 5-hydroxymethylcytidine
  misc_difference 5576: note = n indicates cytidine, 5-methylcytidine, or 5-hydroxymethylcytidine
  misc_difference 5578: note = n indicates cytidine, 5-methylcytidine, or 5-hydroxymethylcytidine
  misc_difference 5580: note = n indicates cytidine, 5-methylcytidine, or 5-hydroxymethylcytidine
  misc_difference 5581: note = n indicates cytidine, 5-methylcytidine, or 5-hydroxymethylcytidine
  misc_difference 5585: note = n indicates cytidine, 5-methylcytidine, or 5-hydroxymethylcytidine
  misc_difference 5590: note = n indicates cytidine, 5-methylcytidine, or 5-hydroxymethylcytidine
  misc_difference 5594: note = n indicates cytidine, 5-methylcytidine, or 5-hydroxymethylcytidine
  misc_difference 5596: note = n indicates cytidine, 5-methylcytidine, or 5-hydroxymethylcytidine
  misc_difference 5602: note = n indicates cytidine, 5-methylcytidine, or 5-hydroxymethylcytidine
  misc_difference 5603: note = n indicates cytidine, 5-methylcytidine, or 5-hydroxymethylcytidine
  misc_difference 5606: note = n indicates cytidine, 5-methylcytidine, or 5-hydroxymethylcytidine
  misc_difference 5607: note = n indicates cytidine, 5-methylcytidine, or 5-hydroxymethylcytidine
  misc_difference 5612: note = n indicates cytidine, 5-methylcytidine, or 5-hydroxymethylcytidine
  misc_difference 5614: note = n indicates cytidine, 5-methylcytidine, or 5-hydroxymethylcytidine
  misc_difference 5615: note = n indicates cytidine, 5-methylcytidine, or 5-hydroxymethylcytidine
  misc_difference 5618: note = n indicates cytidine, 5-methylcytidine, or 5-hydroxymethylcytidine
  misc_difference 5619: note = n indicates cytidine, 5-methylcytidine, or 5-hydroxymethylcytidine
  misc_difference 5620: note = n indicates cytidine, 5-methylcytidine, or 5-hydroxymethylcytidine
  misc_difference 5622: note = n indicates cytidine, 5-methylcytidine, or 5-hydroxymethylcytidine
  misc_difference 5623: note = n indicates cytidine, 5-methylcytidine, or 5-hydroxymethylcytidine
  misc_difference 5627: note = n indicates cytidine, 5-methylcytidine, or 5-hydroxymethylcytidine
  misc_difference 5644: note = n indicates cytidine, 5-methylcytidine, or 5-hydroxymethylcytidine
  misc_difference 5662: note = n indicates cytidine, 5-methylcytidine, or 5-hydroxymethylcytidine
  misc_difference 5666: note = n indicates cytidine, 5-methylcytidine, or 5-hydroxymethylcytidine
  misc_difference 5671: note = n indicates cytidine, 5-methylcytidine, or 5-hydroxymethylcytidine
  misc_difference 5673: note = n indicates cytidine, 5-methylcytidine, or 5-hydroxymethylcytidine
  misc_difference 5676: note = n indicates cytidine, 5-methylcytidine, or 5-hydroxymethylcytidine
  misc_difference 5679: note = n indicates cytidine, 5-methylcytidine, or 5-hydroxymethylcytidine
  misc_difference 5685: note = n indicates cytidine, 5-methylcytidine, or 5-hydroxymethylcytidine
  misc_difference 5695: note = n indicates cytidine, 5-methylcytidine, or 5-hydroxymethylcytidine
  misc_difference 5701: note = n indicates cytidine, 5-methylcytidine, or 5-hydroxymethylcytidine
  misc_difference 5705: note = n indicates cytidine, 5-methylcytidine, or 5-hydroxymethylcytidine
  misc_difference 5708: note = n indicates cytidine, 5-methylcytidine, or 5-hydroxymethylcytidine
  misc_difference 5713: note = n indicates cytidine, 5-methylcytidine, or 5-hydroxymethylcytidine
  misc_difference 5714: note = n indicates cytidine, 5-methylcytidine, or 5-hydroxymethylcytidine
  misc_difference 5716: note = n indicates cytidine, 5-methylcytidine, or 5-hydroxymethylcytidine
  misc_difference 5717: note = n indicates cytidine, 5-methylcytidine, or 5-hydroxymethylcytidine
  misc_difference 5720: note = n indicates cytidine, 5-methylcytidine, or 5-hydroxymethylcytidine
  misc_difference 5722: note = n indicates cytidine, 5-methylcytidine, or 5-hydroxymethylcytidine
  misc_difference 5723: note = n indicates cytidine, 5-methylcytidine, or 5-hydroxymethylcytidine
  misc_difference 5727: note = n indicates cytidine, 5-methylcytidine, or 5-hydroxymethylcytidine
  misc_difference 5733: note = n indicates cytidine, 5-methylcytidine, or 5-hydroxymethylcytidine
  misc_difference 5739: note = n indicates cytidine, 5-methylcytidine, or 5-hydroxymethylcytidine
  misc_difference 5742: note = n indicates cytidine, 5-methylcytidine, or 5-hydroxymethylcytidine
  misc_difference 5749: note = n indicates cytidine, 5-methylcytidine, or 5-hydroxymethylcytidine
  misc_difference 5757: note = n indicates cytidine, 5-methylcytidine, or 5-hydroxymethylcytidine
  misc_difference 5761: note = n indicates cytidine, 5-methylcytidine, or 5-hydroxymethylcytidine
  misc_difference 5766: note = n indicates cytidine, 5-methylcytidine, or 5-hydroxymethylcytidine
  misc_difference 5770: note = n indicates cytidine, 5-methylcytidine, or 5-hydroxymethylcytidine
  misc_difference 5771: note = n indicates cytidine, 5-methylcytidine, or 5-hydroxymethylcytidine
  misc_difference 5791: note = n indicates cytidine, 5-methylcytidine, or 5-hydroxymethylcytidine
  misc_difference 5792: note = n indicates cytidine, 5-methylcytidine, or 5-hydroxymethylcytidine
  misc_difference 5806: note = n indicates cytidine, 5-methylcytidine, or 5-hydroxymethylcytidine
  misc_difference 5812: note = n indicates cytidine, 5-methylcytidine, or 5-hydroxymethylcytidine
  misc_difference 5813: note = n indicates cytidine, 5-methylcytidine, or 5-hydroxymethylcytidine
  misc_difference 5814: note = n indicates cytidine, 5-methylcytidine, or 5-hydroxymethylcytidine
  misc_difference 5815: note = n indicates cytidine, 5-methylcytidine, or 5-hydroxymethylcytidine
  misc_difference 5817: note = n indicates cytidine, 5-methylcytidine, or 5-hydroxymethylcytidine
  misc_difference 5819: note = n indicates cytidine, 5-methylcytidine, or 5-hydroxymethylcytidine
  misc_difference 5820: note = n indicates cytidine, 5-methylcytidine, or 5-hydroxymethylcytidine
  misc_difference 5822: note = n indicates cytidine, 5-methylcytidine, or 5-hydroxymethylcytidine
  misc_difference 5825: note = n indicates cytidine, 5-methylcytidine, or 5-hydroxymethylcytidine
  misc_difference 5826: note = n indicates cytidine, 5-methylcytidine, or 5-hydroxymethylcytidine
  misc_difference 5844: note = n indicates cytidine, 5-methylcytidine, or 5-hydroxymethylcytidine
  misc_difference 5847: note = n indicates cytidine, 5-methylcytidine, or 5-hydroxymethylcytidine
  misc_difference 5849: note = n indicates cytidine, 5-methylcytidine, or 5-hydroxymethylcytidine
  misc_difference 5859: note = n indicates cytidine, 5-methylcytidine, or 5-hydroxymethylcytidine
  misc_difference 5868: note = n indicates cytidine, 5-methylcytidine, or 5-hydroxymethylcytidine
  misc_difference 5869: note = n indicates cytidine, 5-methylcytidine, or 5-hydroxymethylcytidine
  misc_difference 5870: note = n indicates cytidine, 5-methylcytidine, or 5-hydroxymethylcytidine
  misc_difference 5872: note = n indicates cytidine, 5-methylcytidine, or 5-hydroxymethylcytidine
  misc_difference 5874: note = n indicates cytidine, 5-methylcytidine, or 5-hydroxymethylcytidine
  misc_difference 5875: note = n indicates cytidine, 5-methylcytidine, or 5-hydroxymethylcytidine
  misc_difference 5878: note = n indicates cytidine, 5-methylcytidine, or 5-hydroxymethylcytidine
  misc_difference 5882: note = n indicates cytidine, 5-methylcytidine, or 5-hydroxymethylcytidine
  misc_difference 5888: note = n indicates cytidine, 5-methylcytidine, or 5-hydroxymethylcytidine
  misc_difference 5894: note = n indicates cytidine, 5-methylcytidine, or 5-hydroxymethylcytidine
  misc_difference 5895: note = n indicates cytidine, 5-methylcytidine, or 5-hydroxymethylcytidine
  misc_difference 5899: note = n indicates cytidine, 5-methylcytidine, or 5-hydroxymethylcytidine
  misc_difference 5900: note = n indicates cytidine, 5-methylcytidine, or 5-hydroxymethylcytidine
  misc_difference 5915: note = n indicates cytidine, 5-methylcytidine, or 5-hydroxymethylcytidine
  misc_difference 5923: note = n indicates cytidine, 5-methylcytidine, or 5-hydroxymethylcytidine
  misc_difference 5924: note = n indicates cytidine, 5-methylcytidine, or 5-hydroxymethylcytidine
  misc_difference 5929: note = n indicates cytidine, 5-methylcytidine, or 5-hydroxymethylcytidine
  misc_difference 5932: note = n indicates cytidine, 5-methylcytidine, or 5-hydroxymethylcytidine
  misc_difference 5937: note = n indicates cytidine, 5-methylcytidine, or 5-hydroxymethylcytidine
  misc_difference 5943: note = n indicates cytidine, 5-methylcytidine, or 5-hydroxymethylcytidine
  misc_difference 5946: note = n indicates cytidine, 5-methylcytidine, or 5-hydroxymethylcytidine
  misc_difference 5951: note = n indicates cytidine, 5-methylcytidine, or 5-hydroxymethylcytidine
  misc_difference 5952: note = n indicates cytidine, 5-methylcytidine, or 5-hydroxymethylcytidine
  misc_difference 5958: note = n indicates cytidine, 5-methylcytidine, or 5-hydroxymethylcytidine
  misc_difference 5971: note = n indicates cytidine, 5-methylcytidine, or 5-hydroxymethylcytidine
  misc_difference 5990: note = n indicates cytidine, 5-methylcytidine, or 5-hydroxymethylcytidine
  misc_difference 5993: note = n indicates cytidine, 5-methylcytidine, or 5-hydroxymethylcytidine
  misc_difference 5994: note = n indicates cytidine, 5-methylcytidine, or 5-hydroxymethylcytidine
  misc_difference 5998: note = n indicates cytidine, 5-methylcytidine, or 5-hydroxymethylcytidine
  misc_difference 5999: note = n indicates cytidine, 5-methylcytidine, or 5-hydroxymethylcytidine
  misc_difference 6000: note = n indicates cytidine, 5-methylcytidine, or 5-hydroxymethylcytidine
  misc_difference 6003: note = n indicates cytidine, 5-methylcytidine, or 5-hydroxymethylcytidine
  misc_difference 6006: note = n indicates cytidine, 5-methylcytidine, or 5-hydroxymethylcytidine
  misc_difference 6007: note = n indicates cytidine, 5-methylcytidine, or 5-hydroxymethylcytidine
  misc_difference 6012: note = n indicates cytidine, 5-methylcytidine, or 5-hydroxymethylcytidine
  misc_difference 6013: note = n indicates cytidine, 5-methylcytidine, or 5-hydroxymethylcytidine
  misc_difference 6022: note = n indicates cytidine, 5-methylcytidine, or 5-hydroxymethylcytidine
  misc_difference 6025: note = n indicates cytidine, 5-methylcytidine, or 5-hydroxymethylcytidine
  misc_difference 6035: note = n indicates cytidine, 5-methylcytidine, or 5-hydroxymethylcytidine
  misc_difference 6036: note = n indicates cytidine, 5-methylcytidine, or 5-hydroxymethylcytidine
  misc_difference 6040: note = n indicates cytidine, 5-methylcytidine, or 5-hydroxymethylcytidine
  misc_difference 6041: note = n indicates cytidine, 5-methylcytidine, or 5-hydroxymethylcytidine
  misc_difference 6046: note = n indicates cytidine, 5-methylcytidine, or 5-hydroxymethylcytidine
  misc_difference 6050: note = n indicates cytidine, 5-methylcytidine, or 5-hydroxymethylcytidine
  misc_difference 6051: note = n indicates cytidine, 5-methylcytidine, or 5-hydroxymethylcytidine
  misc_difference 6052: note = n indicates cytidine, 5-methylcytidine, or 5-hydroxymethylcytidine
  misc_difference 6053: note = n indicates cytidine, 5-methylcytidine, or 5-hydroxymethylcytidine
  misc_difference 6059: note = n indicates cytidine, 5-methylcytidine, or 5-hydroxymethylcytidine
  misc_difference 6061: note = n indicates cytidine, 5-methylcytidine, or 5-hydroxymethylcytidine
  misc_difference 6070: note = n indicates cytidine, 5-methylcytidine, or 5-hydroxymethylcytidine
  misc_difference 6071: note = n indicates cytidine, 5-methylcytidine, or 5-hydroxymethylcytidine
  misc_difference 6077: note = n indicates cytidine, 5-methylcytidine, or 5-hydroxymethylcytidine
  misc_difference 6079: note = n indicates cytidine, 5-methylcytidine, or 5-hydroxymethylcytidine
  misc_difference 6080: note = n indicates cytidine, 5-methylcytidine, or 5-hydroxymethylcytidine
  misc_difference 6095: note = n indicates cytidine, 5-methylcytidine, or 5-hydroxymethylcytidine
  misc_difference 6099: note = n indicates cytidine, 5-methylcytidine, or 5-hydroxymethylcytidine
  misc_difference 6100: note = n indicates cytidine, 5-methylcytidine, or 5-hydroxymethylcytidine
  misc_difference 6103: note = n indicates cytidine, 5-methylcytidine, or 5-hydroxymethylcytidine
  misc_difference 6109: note = n indicates cytidine, 5-methylcytidine, or 5-hydroxymethylcytidine
  misc_difference 6112: note = n indicates cytidine, 5-methylcytidine, or 5-hydroxymethylcytidine
  misc_difference 6116: note = n indicates cytidine, 5-methylcytidine, or 5-hydroxymethylcytidine
  misc_difference 6126: note = n indicates cytidine, 5-methylcytidine, or 5-hydroxymethylcytidine
  misc_difference 6127: note = n indicates cytidine, 5-methylcytidine, or 5-hydroxymethylcytidine
  misc_difference 6134: note = n indicates cytidine, 5-methylcytidine, or 5-hydroxymethylcytidine
  misc_difference 6139: note = n indicates cytidine, 5-methylcytidine, or 5-hydroxymethylcytidine
  misc_difference 6140: note = n indicates cytidine, 5-methylcytidine, or 5-hydroxymethylcytidine
  misc_difference 6149: note = n indicates cytidine, 5-methylcytidine, or 5-hydroxymethylcytidine
  misc_difference 6158: note = n indicates cytidine, 5-methylcytidine, or 5-hydroxymethylcytidine
  misc_difference 6163: note = n indicates cytidine, 5-methylcytidine, or 5-hydroxymethylcytidine
  misc_difference 6166: note = n indicates cytidine, 5-methylcytidine, or 5-hydroxymethylcytidine
  misc_difference 6170: note = n indicates cytidine, 5-methylcytidine, or 5-hydroxymethylcytidine
  misc_difference 6173: note = n indicates cytidine, 5-methylcytidine, or 5-hydroxymethylcytidine
  misc_difference 6179: note = n indicates cytidine, 5-methylcytidine, or 5-hydroxymethylcytidine
  misc_difference 6181: note = n indicates cytidine, 5-methylcytidine, or 5-hydroxymethylcytidine
  misc_difference 6184: note = n indicates cytidine, 5-methylcytidine, or 5-hydroxymethylcytidine
  misc_difference 6185: note = n indicates cytidine, 5-methylcytidine, or 5-hydroxymethylcytidine
  misc_difference 6194: note = n indicates cytidine, 5-methylcytidine, or 5-hydroxymethylcytidine
  misc_difference 6195: note = n indicates cytidine, 5-methylcytidine, or 5-hydroxymethylcytidine
  misc_difference 6196: note = n indicates cytidine, 5-methylcytidine, or 5-hydroxymethylcytidine
  misc_difference 6199: note = n indicates cytidine, 5-methylcytidine, or 5-hydroxymethylcytidine
  misc_difference 6204: note = n indicates cytidine, 5-methylcytidine, or 5-hydroxymethylcytidine
  misc_difference 6207: note = n indicates cytidine, 5-methylcytidine, or 5-hydroxymethylcytidine
  misc_difference 6209: note = n indicates cytidine, 5-methylcytidine, or 5-hydroxymethylcytidine
  misc_difference 6212: note = n indicates cytidine, 5-methylcytidine, or 5-hydroxymethylcytidine
  misc_difference 6216: note = n indicates cytidine, 5-methylcytidine, or 5-hydroxymethylcytidine
  misc_difference 6217: note = n indicates cytidine, 5-methylcytidine, or 5-hydroxymethylcytidine
  misc_difference 6225: note = n indicates cytidine, 5-methylcytidine, or 5-hydroxymethylcytidine
  misc_difference 6227: note = n indicates cytidine, 5-methylcytidine, or 5-hydroxymethylcytidine
  misc_difference 6229: note = n indicates cytidine, 5-methylcytidine, or 5-hydroxymethylcytidine
  misc_difference 6230: note = n indicates cytidine, 5-methylcytidine, or 5-hydroxymethylcytidine
  misc_difference 6240: note = n indicates cytidine, 5-methylcytidine, or 5-hydroxymethylcytidine
  misc_difference 6241: note = n indicates cytidine, 5-methylcytidine, or 5-hydroxymethylcytidine
  misc_difference 6242: note = n indicates cytidine, 5-methylcytidine, or 5-hydroxymethylcytidine
  misc_difference 6244: note = n indicates cytidine, 5-methylcytidine, or 5-hydroxymethylcytidine
  misc_difference 6249: note = n indicates cytidine, 5-methylcytidine, or 5-hydroxymethylcytidine
  misc_difference 6253: note = n indicates cytidine, 5-methylcytidine, or 5-hydroxymethylcytidine
  misc_difference 6256: note = n indicates cytidine, 5-methylcytidine, or 5-hydroxymethylcytidine
  misc_difference 6261: note = n indicates cytidine, 5-methylcytidine, or 5-hydroxymethylcytidine
  misc_difference 6262: note = n indicates cytidine, 5-methylcytidine, or 5-hydroxymethylcytidine
  misc_difference 6265: note = n indicates cytidine, 5-methylcytidine, or 5-hydroxymethylcytidine
  misc_difference 6268: note = n indicates cytidine, 5-methylcytidine, or 5-hydroxymethylcytidine
  misc_difference 6272: note = n indicates cytidine, 5-methylcytidine, or 5-hydroxymethylcytidine
  misc_difference 6273: note = n indicates cytidine, 5-methylcytidine, or 5-hydroxymethylcytidine
  misc_difference 6278: note = n indicates cytidine, 5-methylcytidine, or 5-hydroxymethylcytidine
  misc_difference 6280: note = n indicates cytidine, 5-methylcytidine, or 5-hydroxymethylcytidine
  misc_difference 6282: note = n indicates cytidine, 5-methylcytidine, or 5-hydroxymethylcytidine
  misc_difference 6284: note = n indicates cytidine, 5-methylcytidine, or 5-hydroxymethylcytidine
  misc_difference 6285: note = n indicates cytidine, 5-methylcytidine, or 5-hydroxymethylcytidine
  misc_difference 6290: note = n indicates cytidine, 5-methylcytidine, or 5-hydroxymethylcytidine
  misc_difference 6293: note = n indicates cytidine, 5-methylcytidine, or 5-hydroxymethylcytidine
  misc_difference 6294: note = n indicates cytidine, 5-methylcytidine, or 5-hydroxymethylcytidine
  misc_difference 6298: note = n indicates cytidine, 5-methylcytidine, or 5-hydroxymethylcytidine
  misc_difference 6301: note = n indicates cytidine, 5-methylcytidine, or 5-hydroxymethylcytidine
  misc_difference 6304: note = n indicates cytidine, 5-methylcytidine, or 5-hydroxymethylcytidine
  misc_difference 6305: note = n indicates cytidine, 5-methylcytidine, or 5-hydroxymethylcytidine
  misc_difference 6307: note = n indicates cytidine, 5-methylcytidine, or 5-hydroxymethylcytidine
  misc_difference 6320: note = n indicates cytidine, 5-methylcytidine, or 5-hydroxymethylcytidine
  misc_difference 6326: note = n indicates cytidine, 5-methylcytidine, or 5-hydroxymethylcytidine
  misc_difference 6328: note = n indicates cytidine, 5-methylcytidine, or 5-hydroxymethylcytidine
  misc_difference 6330: note = n indicates cytidine, 5-methylcytidine, or 5-hydroxymethylcytidine
  misc_difference 6345: note = n indicates cytidine, 5-methylcytidine, or 5-hydroxymethylcytidine
  misc_difference 6346: note = n indicates cytidine, 5-methylcytidine, or 5-hydroxymethylcytidine
  misc_difference 6347: note = n indicates cytidine, 5-methylcytidine, or 5-hydroxymethylcytidine
  misc_difference 6358: note = n indicates cytidine, 5-methylcytidine, or 5-hydroxymethylcytidine
  misc_difference 6361: note = n indicates cytidine, 5-methylcytidine, or 5-hydroxymethylcytidine
  misc_difference 6364: note = n indicates cytidine, 5-methylcytidine, or 5-hydroxymethylcytidine
  misc_difference 6365: note = n indicates cytidine, 5-methylcytidine, or 5-hydroxymethylcytidine
  misc_difference 6380: note = n indicates cytidine, 5-methylcytidine, or 5-hydroxymethylcytidine
  misc_difference 6383: note = n indicates cytidine, 5-methylcytidine, or 5-hydroxymethylcytidine
  misc_difference 6394: note = n indicates cytidine, 5-methylcytidine, or 5-hydroxymethylcytidine
  misc_difference 6418: note = n indicates cytidine, 5-methylcytidine, or 5-hydroxymethylcytidine
  misc_difference 6431: note = n indicates cytidine, 5-methylcytidine, or 5-hydroxymethylcytidine
  misc_difference 6432: note = n indicates cytidine, 5-methylcytidine, or 5-hydroxymethylcytidine
  misc_difference 6433: note = n indicates cytidine, 5-methylcytidine, or 5-hydroxymethylcytidine
  misc_difference 6434: note = n indicates cytidine, 5-methylcytidine, or 5-hydroxymethylcytidine
  misc_difference 6437: note = n indicates cytidine, 5-methylcytidine, or 5-hydroxymethylcytidine
  misc_difference 6441: note = n indicates cytidine, 5-methylcytidine, or 5-hydroxymethylcytidine
  misc_difference 6445: note = n indicates cytidine, 5-methylcytidine, or 5-hydroxymethylcytidine
  misc_difference 6455: note = n indicates cytidine, 5-methylcytidine, or 5-hydroxymethylcytidine
  misc_difference 6467: note = n indicates cytidine, 5-methylcytidine, or 5-hydroxymethylcytidine
  misc_difference 6472: note = n indicates cytidine, 5-methylcytidine, or 5-hydroxymethylcytidine
  misc_difference 6473: note = n indicates cytidine, 5-methylcytidine, or 5-hydroxymethylcytidine
  misc_difference 6486: note = n indicates cytidine, 5-methylcytidine, or 5-hydroxymethylcytidine
  misc_difference 6487: note = n indicates cytidine, 5-methylcytidine, or 5-hydroxymethylcytidine
  misc_difference 6493: note = n indicates cytidine, 5-methylcytidine, or 5-hydroxymethylcytidine
  misc_difference 6496: note = n indicates cytidine, 5-methylcytidine, or 5-hydroxymethylcytidine
  misc_difference 6499: note = n indicates cytidine, 5-methylcytidine, or 5-hydroxymethylcytidine
  misc_difference 6501: note = n indicates cytidine, 5-methylcytidine, or 5-hydroxymethylcytidine
  misc_difference 6508: note = n indicates cytidine, 5-methylcytidine, or 5-hydroxymethylcytidine
  misc_difference 6514: note = n indicates cytidine, 5-methylcytidine, or 5-hydroxymethylcytidine
  misc_difference 6516: note = n indicates cytidine, 5-methylcytidine, or 5-hydroxymethylcytidine
  misc_difference 6534: note = n indicates cytidine, 5-methylcytidine, or 5-hydroxymethylcytidine
  misc_difference 6539: note = n indicates cytidine, 5-methylcytidine, or 5-hydroxymethylcytidine
  misc_difference 6543: note = n indicates cytidine, 5-methylcytidine, or 5-hydroxymethylcytidine
  misc_difference 6544: note = n indicates cytidine, 5-methylcytidine, or 5-hydroxymethylcytidine
  misc_difference 6551: note = n indicates cytidine, 5-methylcytidine, or 5-hydroxymethylcytidine
  misc_difference 6566: note = n indicates cytidine, 5-methylcytidine, or 5-hydroxymethylcytidine
  misc_difference 6578: note = n indicates cytidine, 5-methylcytidine, or 5-hydroxymethylcytidine
  misc_difference 6589: note = n indicates cytidine, 5-methylcytidine, or 5-hydroxymethylcytidine
  misc_difference 6591: note = n indicates cytidine, 5-methylcytidine, or 5-hydroxymethylcytidine
  misc_difference 6592: note = n indicates cytidine, 5-methylcytidine, or 5-hydroxymethylcytidine
  misc_difference 6598: note = n indicates cytidine, 5-methylcytidine, or 5-hydroxymethylcytidine
  misc_difference 6603: note = n indicates cytidine, 5-methylcytidine, or 5-hydroxymethylcytidine
  misc_difference 6607: note = n indicates cytidine, 5-methylcytidine, or 5-hydroxymethylcytidine
  misc_difference 6615: note = n indicates cytidine, 5-methylcytidine, or 5-hydroxymethylcytidine
  misc_difference 6618: note = n indicates cytidine, 5-methylcytidine, or 5-hydroxymethylcytidine
  misc_difference 6619: note = n indicates cytidine, 5-methylcytidine, or 5-hydroxymethylcytidine
  misc_difference 6620: note = n indicates cytidine, 5-methylcytidine, or 5-hydroxymethylcytidine
  misc_difference 6627: note = n indicates cytidine, 5-methylcytidine, or 5-hydroxymethylcytidine
  misc_difference 6635: note = n indicates cytidine, 5-methylcytidine, or 5-hydroxymethylcytidine
  misc_difference 6636: note = n indicates cytidine, 5-methylcytidine, or 5-hydroxymethylcytidine
  misc_difference 6640: note = n indicates cytidine, 5-methylcytidine, or 5-hydroxymethylcytidine
  misc_difference 6643: note = n indicates cytidine, 5-methylcytidine, or 5-hydroxymethylcytidine
  misc_difference 6644: note = n indicates cytidine, 5-methylcytidine, or 5-hydroxymethylcytidine
  misc_difference 6648: note = n indicates cytidine, 5-methylcytidine, or 5-hydroxymethylcytidine
  misc_difference 6649: note = n indicates cytidine, 5-methylcytidine, or 5-hydroxymethylcytidine
  misc_difference 6651: note = n indicates cytidine, 5-methylcytidine, or 5-hydroxymethylcytidine
  misc_difference 6655: note = n indicates cytidine, 5-methylcytidine, or 5-hydroxymethylcytidine
  misc_difference 6658: note = n indicates cytidine, 5-methylcytidine, or 5-hydroxymethylcytidine
  misc_difference 6661: note = n indicates cytidine, 5-methylcytidine, or 5-hydroxymethylcytidine
  misc_difference 6666: note = n indicates cytidine, 5-methylcytidine, or 5-hydroxymethylcytidine
  misc_difference 6671: note = n indicates cytidine, 5-methylcytidine, or 5-hydroxymethylcytidine
  misc_difference 6677: note = n indicates cytidine, 5-methylcytidine, or 5-hydroxymethylcytidine
  misc_difference 6678: note = n indicates cytidine, 5-methylcytidine, or 5-hydroxymethylcytidine
  misc_difference 6680: note = n indicates cytidine, 5-methylcytidine, or 5-hydroxymethylcytidine
  misc_difference 6681: note = n indicates cytidine, 5-methylcytidine, or 5-hydroxymethylcytidine
  misc_difference 6687: note = n indicates cytidine, 5-methylcytidine, or 5-hydroxymethylcytidine
  misc_difference 6706: note = n indicates cytidine, 5-methylcytidine, or 5-hydroxymethylcytidine
  misc_difference 6710: note = n indicates cytidine, 5-methylcytidine, or 5-hydroxymethylcytidine
  misc_difference 6711: note = n indicates cytidine, 5-methylcytidine, or 5-hydroxymethylcytidine
  misc_difference 6714: note = n indicates cytidine, 5-methylcytidine, or 5-hydroxymethylcytidine
  misc_difference 6717: note = n indicates cytidine, 5-methylcytidine, or 5-hydroxymethylcytidine
  misc_difference 6718: note = n indicates cytidine, 5-methylcytidine, or 5-hydroxymethylcytidine
  misc_difference 6722: note = n indicates cytidine, 5-methylcytidine, or 5-hydroxymethylcytidine
  misc_difference 6726: note = n indicates cytidine, 5-methylcytidine, or 5-hydroxymethylcytidine
  misc_difference 6730: note = n indicates cytidine, 5-methylcytidine, or 5-hydroxymethylcytidine
  misc_difference 6732: note = n indicates cytidine, 5-methylcytidine, or 5-hydroxymethylcytidine
  misc_difference 6745: note = n indicates cytidine, 5-methylcytidine, or 5-hydroxymethylcytidine
  misc_difference 6748: note = n indicates cytidine, 5-methylcytidine, or 5-hydroxymethylcytidine
  misc_difference 6755: note = n indicates cytidine, 5-methylcytidine, or 5-hydroxymethylcytidine
  misc_difference 6761: note = n indicates cytidine, 5-methylcytidine, or 5-hydroxymethylcytidine
  misc_difference 6763: note = n indicates cytidine, 5-methylcytidine, or 5-hydroxymethylcytidine
  misc_difference 6772: note = n indicates cytidine, 5-methylcytidine, or 5-hydroxymethylcytidine
  misc_difference 6773: note = n indicates cytidine, 5-methylcytidine, or 5-hydroxymethylcytidine
  misc_difference 6777: note = n indicates cytidine, 5-methylcytidine, or 5-hydroxymethylcytidine
  misc_difference 6779: note = n indicates cytidine, 5-methylcytidine, or 5-hydroxymethylcytidine
  misc_difference 6782: note = n indicates cytidine, 5-methylcytidine, or 5-hydroxymethylcytidine
  misc_difference 6783: note = n indicates cytidine, 5-methylcytidine, or 5-hydroxymethylcytidine
  misc_difference 6786: note = n indicates cytidine, 5-methylcytidine, or 5-hydroxymethylcytidine
  misc_difference 6787: note = n indicates cytidine, 5-methylcytidine, or 5-hydroxymethylcytidine
  misc_difference 6801: note = n indicates cytidine, 5-methylcytidine, or 5-hydroxymethylcytidine
  misc_difference 6808: note = n indicates cytidine, 5-methylcytidine, or 5-hydroxymethylcytidine
  misc_difference 6812: note = n indicates cytidine, 5-methylcytidine, or 5-hydroxymethylcytidine
  misc_difference 6815: note = n indicates cytidine, 5-methylcytidine, or 5-hydroxymethylcytidine
  misc_difference 6817: note = n indicates cytidine, 5-methylcytidine, or 5-hydroxymethylcytidine
  misc_difference 6820: note = n indicates cytidine, 5-methylcytidine, or 5-hydroxymethylcytidine
  misc_difference 6839: note = n indicates cytidine, 5-methylcytidine, or 5-hydroxymethylcytidine
  misc_difference 6842: note = n indicates cytidine, 5-methylcytidine, or 5-hydroxymethylcytidine
  misc_difference 6844: note = n indicates cytidine, 5-methylcytidine, or 5-hydroxymethylcytidine
  misc_difference 6845: note = n indicates cytidine, 5-methylcytidine, or 5-hydroxymethylcytidine
  misc_difference 6850: note = n indicates cytidine, 5-methylcytidine, or 5-hydroxymethylcytidine
  misc_difference 6852: note = n indicates cytidine, 5-methylcytidine, or 5-hydroxymethylcytidine
  misc_difference 6856: note = n indicates cytidine, 5-methylcytidine, or 5-hydroxymethylcytidine
  misc_difference 6857: note = n indicates cytidine, 5-methylcytidine, or 5-hydroxymethylcytidine
  misc_difference 6859: note = n indicates cytidine, 5-methylcytidine, or 5-hydroxymethylcytidine
  misc_difference 6870: note = n indicates cytidine, 5-methylcytidine, or 5-hydroxymethylcytidine
  misc_difference 6878: note = n indicates cytidine, 5-methylcytidine, or 5-hydroxymethylcytidine
  misc_difference 6890: note = n indicates cytidine, 5-methylcytidine, or 5-hydroxymethylcytidine
  misc_difference 6892: note = n indicates cytidine, 5-methylcytidine, or 5-hydroxymethylcytidine
  misc_difference 6897: note = n indicates cytidine, 5-methylcytidine, or 5-hydroxymethylcytidine
  misc_difference 6904: note = n indicates cytidine, 5-methylcytidine, or 5-hydroxymethylcytidine
  misc_difference 6906: note = n indicates cytidine, 5-methylcytidine, or 5-hydroxymethylcytidine
  misc_difference 6916: note = n indicates cytidine, 5-methylcytidine, or 5-hydroxymethylcytidine
  misc_difference 6919: note = n indicates cytidine, 5-methylcytidine, or 5-hydroxymethylcytidine
  misc_difference 6923: note = n indicates cytidine, 5-methylcytidine, or 5-hydroxymethylcytidine
  misc_difference 6926: note = n indicates cytidine, 5-methylcytidine, or 5-hydroxymethylcytidine
  misc_difference 6934: note = n indicates cytidine, 5-methylcytidine, or 5-hydroxymethylcytidine
  misc_difference 6937: note = n indicates cytidine, 5-methylcytidine, or 5-hydroxymethylcytidine
  misc_difference 6942: note = n indicates cytidine, 5-methylcytidine, or 5-hydroxymethylcytidine
  misc_difference 6948: note = n indicates cytidine, 5-methylcytidine, or 5-hydroxymethylcytidine
  misc_difference 6949: note = n indicates cytidine, 5-methylcytidine, or 5-hydroxymethylcytidine
  misc_difference 6950: note = n indicates cytidine, 5-methylcytidine, or 5-hydroxymethylcytidine
  misc_difference 6952: note = n indicates cytidine, 5-methylcytidine, or 5-hydroxymethylcytidine
  misc_difference 6958: note = n indicates cytidine, 5-methylcytidine, or 5-hydroxymethylcytidine
  misc_difference 6971: note = n indicates cytidine, 5-methylcytidine, or 5-hydroxymethylcytidine
  misc_difference 6976: note = n indicates cytidine, 5-methylcytidine, or 5-hydroxymethylcytidine
  misc_difference 6977: note = n indicates cytidine, 5-methylcytidine, or 5-hydroxymethylcytidine
  misc_difference 6988: note = n indicates cytidine, 5-methylcytidine, or 5-hydroxymethylcytidine
  misc_difference 6998: note = n indicates cytidine, 5-methylcytidine, or 5-hydroxymethylcytidine
  misc_difference 6999: note = n indicates cytidine, 5-methylcytidine, or 5-hydroxymethylcytidine
  misc_difference 7001: note = n indicates cytidine, 5-methylcytidine, or 5-hydroxymethylcytidine
  misc_difference 7003: note = n indicates cytidine, 5-methylcytidine, or 5-hydroxymethylcytidine
  misc_difference 7005: note = n indicates cytidine, 5-methylcytidine, or 5-hydroxymethylcytidine
  misc_difference 7016: note = n indicates cytidine, 5-methylcytidine, or 5-hydroxymethylcytidine
  misc_difference 7018: note = n indicates cytidine, 5-methylcytidine, or 5-hydroxymethylcytidine
  misc_difference 7022: note = n indicates cytidine, 5-methylcytidine, or 5-hydroxymethylcytidine
  misc_difference 7028: note = n indicates cytidine, 5-methylcytidine, or 5-hydroxymethylcytidine
  misc_difference 7037: note = n indicates cytidine, 5-methylcytidine, or 5-hydroxymethylcytidine
  misc_difference 7039: note = n indicates cytidine, 5-methylcytidine, or 5-hydroxymethylcytidine
  misc_difference 7043: note = n indicates cytidine, 5-methylcytidine, or 5-hydroxymethylcytidine
  misc_difference 7059: note = n indicates cytidine, 5-methylcytidine, or 5-hydroxymethylcytidine
  misc_difference 7062: note = n indicates cytidine, 5-methylcytidine, or 5-hydroxymethylcytidine
  misc_difference 7066: note = n indicates cytidine, 5-methylcytidine, or 5-hydroxymethylcytidine
  misc_difference 7067: note = n indicates cytidine, 5-methylcytidine, or 5-hydroxymethylcytidine
  misc_difference 7072: note = n indicates cytidine, 5-methylcytidine, or 5-hydroxymethylcytidine
  misc_difference 7074: note = n indicates cytidine, 5-methylcytidine, or 5-hydroxymethylcytidine
  misc_difference 7075: note = n indicates cytidine, 5-methylcytidine, or 5-hydroxymethylcytidine
  misc_difference 7081: note = n indicates cytidine, 5-methylcytidine, or 5-hydroxymethylcytidine
  misc_difference 7084: note = n indicates cytidine, 5-methylcytidine, or 5-hydroxymethylcytidine
  misc_difference 7088: note = n indicates cytidine, 5-methylcytidine, or 5-hydroxymethylcytidine
  misc_difference 7100: note = n indicates cytidine, 5-methylcytidine, or 5-hydroxymethylcytidine
  misc_difference 7106: note = n indicates cytidine, 5-methylcytidine, or 5-hydroxymethylcytidine
  misc_difference 7118: note = n indicates cytidine, 5-methylcytidine, or 5-hydroxymethylcytidine
  misc_difference 7123: note = n indicates cytidine, 5-methylcytidine, or 5-hydroxymethylcytidine
  misc_difference 7127: note = n indicates cytidine, 5-methylcytidine, or 5-hydroxymethylcytidine
  misc_difference 7138: note = n indicates cytidine, 5-methylcytidine, or 5-hydroxymethylcytidine
  misc_difference 7142: note = n indicates cytidine, 5-methylcytidine, or 5-hydroxymethylcytidine
  misc_difference 7148: note = n indicates cytidine, 5-methylcytidine, or 5-hydroxymethylcytidine
  misc_difference 7150: note = n indicates cytidine, 5-methylcytidine, or 5-hydroxymethylcytidine
  misc_difference 7151: note = n indicates cytidine, 5-methylcytidine, or 5-hydroxymethylcytidine
  misc_difference 7153: note = n indicates cytidine, 5-methylcytidine, or 5-hydroxymethylcytidine
  misc_difference 7154: note = n indicates cytidine, 5-methylcytidine, or 5-hydroxymethylcytidine
  misc_difference 7172: note = n indicates cytidine, 5-methylcytidine, or 5-hydroxymethylcytidine
  misc_difference 7186: note = n indicates cytidine, 5-methylcytidine, or 5-hydroxymethylcytidine
  misc_difference 7196: note = n indicates cytidine, 5-methylcytidine, or 5-hydroxymethylcytidine
  misc_difference 7204: note = n indicates cytidine, 5-methylcytidine, or 5-hydroxymethylcytidine
  misc_difference 7206: note = n indicates cytidine, 5-methylcytidine, or 5-hydroxymethylcytidine
  misc_difference 7207: note = n indicates cytidine, 5-methylcytidine, or 5-hydroxymethylcytidine
  misc_difference 7214: note = n indicates cytidine, 5-methylcytidine, or 5-hydroxymethylcytidine
  misc_difference 7238: note = n indicates cytidine, 5-methylcytidine, or 5-hydroxymethylcytidine
  misc_difference 7240: note = n indicates cytidine, 5-methylcytidine, or 5-hydroxymethylcytidine
  misc_difference 7241: note = n indicates cytidine, 5-methylcytidine, or 5-hydroxymethylcytidine
  misc_difference 7246: note = n indicates cytidine, 5-methylcytidine, or 5-hydroxymethylcytidine
  misc_difference 7247: note = n indicates cytidine, 5-methylcytidine, or 5-hydroxymethylcytidine
  misc_difference 7250: note = n indicates cytidine, 5-methylcytidine, or 5-hydroxymethylcytidine
  misc_difference 7252: note = n indicates cytidine, 5-methylcytidine, or 5-hydroxymethylcytidine
  misc_difference 7255: note = n indicates cytidine, 5-methylcytidine, or 5-hydroxymethylcytidine
  misc_difference 7259: note = n indicates cytidine, 5-methylcytidine, or 5-hydroxymethylcytidine
  misc_difference 7260: note = n indicates cytidine, 5-methylcytidine, or 5-hydroxymethylcytidine
  misc_difference 7267: note = n indicates cytidine, 5-methylcytidine, or 5-hydroxymethylcytidine
  misc_difference 7271: note = n indicates cytidine, 5-methylcytidine, or 5-hydroxymethylcytidine
  misc_difference 7272: note = n indicates cytidine, 5-methylcytidine, or 5-hydroxymethylcytidine
  misc_difference 7273: note = n indicates cytidine, 5-methylcytidine, or 5-hydroxymethylcytidine
  misc_difference 7274: note = n indicates cytidine, 5-methylcytidine, or 5-hydroxymethylcytidine
  misc_difference 7275: note = n indicates cytidine, 5-methylcytidine, or 5-hydroxymethylcytidine
  misc_difference 7284: note = n indicates cytidine, 5-methylcytidine, or 5-hydroxymethylcytidine
  misc_difference 7293: note = n indicates cytidine, 5-methylcytidine, or 5-hydroxymethylcytidine
  misc_difference 7298: note = n indicates cytidine, 5-methylcytidine, or 5-hydroxymethylcytidine
  misc_difference 7302: note = n indicates cytidine, 5-methylcytidine, or 5-hydroxymethylcytidine
  misc_difference 7303: note = n indicates cytidine, 5-methylcytidine, or 5-hydroxymethylcytidine
  misc_difference 7305: note = n indicates cytidine, 5-methylcytidine, or 5-hydroxymethylcytidine
  misc_difference 7309: note = n indicates cytidine, 5-methylcytidine, or 5-hydroxymethylcytidine
  misc_difference 7312: note = n indicates cytidine, 5-methylcytidine, or 5-hydroxymethylcytidine
  misc_difference 7316: note = n indicates cytidine, 5-methylcytidine, or 5-hydroxymethylcytidine
  misc_difference 7323: note = n indicates cytidine, 5-methylcytidine, or 5-hydroxymethylcytidine
  misc_difference 7334: note = n indicates cytidine, 5-methylcytidine, or 5-hydroxymethylcytidine
  misc_difference 7345: note = n indicates cytidine, 5-methylcytidine, or 5-hydroxymethylcytidine
  misc_difference 7350: note = n indicates cytidine, 5-methylcytidine, or 5-hydroxymethylcytidine
  misc_difference 7360: note = n indicates cytidine, 5-methylcytidine, or 5-hydroxymethylcytidine
  misc_difference 7363: note = n indicates cytidine, 5-methylcytidine, or 5-hydroxymethylcytidine
  misc_difference 7365: note = n indicates cytidine, 5-methylcytidine, or 5-hydroxymethylcytidine
  misc_difference 7367: note = n indicates cytidine, 5-methylcytidine, or 5-hydroxymethylcytidine
  misc_difference 7373: note = n indicates cytidine, 5-methylcytidine, or 5-hydroxymethylcytidine
  misc_difference 7374: note = n indicates cytidine, 5-methylcytidine, or 5-hydroxymethylcytidine
  misc_difference 7386: note = n indicates cytidine, 5-methylcytidine, or 5-hydroxymethylcytidine
  misc_difference 7390: note = n indicates cytidine, 5-methylcytidine, or 5-hydroxymethylcytidine
  misc_difference 7395: note = n indicates cytidine, 5-methylcytidine, or 5-hydroxymethylcytidine
  misc_difference 7400: note = n indicates cytidine, 5-methylcytidine, or 5-hydroxymethylcytidine
  misc_difference 7405: note = n indicates cytidine, 5-methylcytidine, or 5-hydroxymethylcytidine
  misc_difference 7414: note = n indicates cytidine, 5-methylcytidine, or 5-hydroxymethylcytidine
  misc_difference 7426: note = n indicates cytidine, 5-methylcytidine, or 5-hydroxymethylcytidine
  misc_difference 7427: note = n indicates cytidine, 5-methylcytidine, or 5-hydroxymethylcytidine
  misc_difference 7435: note = n indicates cytidine, 5-methylcytidine, or 5-hydroxymethylcytidine
  misc_difference 7438: note = n indicates cytidine, 5-methylcytidine, or 5-hydroxymethylcytidine
  misc_difference 7439: note = n indicates cytidine, 5-methylcytidine, or 5-hydroxymethylcytidine
  misc_difference 7442: note = n indicates cytidine, 5-methylcytidine, or 5-hydroxymethylcytidine
  misc_difference 7453: note = n indicates cytidine, 5-methylcytidine, or 5-hydroxymethylcytidine
  misc_difference 7454: note = n indicates cytidine, 5-methylcytidine, or 5-hydroxymethylcytidine
  misc_difference 7459: note = n indicates cytidine, 5-methylcytidine, or 5-hydroxymethylcytidine
  misc_difference 7462: note = n indicates cytidine, 5-methylcytidine, or 5-hydroxymethylcytidine
  misc_difference 7464: note = n indicates cytidine, 5-methylcytidine, or 5-hydroxymethylcytidine
  misc_difference 7468: note = n indicates cytidine, 5-methylcytidine, or 5-hydroxymethylcytidine
  misc_difference 7472: note = n indicates cytidine, 5-methylcytidine, or 5-hydroxymethylcytidine
  misc_difference 7483: note = n indicates cytidine, 5-methylcytidine, or 5-hydroxymethylcytidine
  misc_difference 7487: note = n indicates cytidine, 5-methylcytidine, or 5-hydroxymethylcytidine
  misc_difference 7490: note = n indicates cytidine, 5-methylcytidine, or 5-hydroxymethylcytidine
  misc_difference 7493: note = n indicates cytidine, 5-methylcytidine, or 5-hydroxymethylcytidine
  misc_difference 7494: note = n indicates cytidine, 5-methylcytidine, or 5-hydroxymethylcytidine
  misc_difference 7504: note = n indicates cytidine, 5-methylcytidine, or 5-hydroxymethylcytidine
  misc_difference 7505: note = n indicates cytidine, 5-methylcytidine, or 5-hydroxymethylcytidine
  misc_difference 7506: note = n indicates cytidine, 5-methylcytidine, or 5-hydroxymethylcytidine
  misc_difference 7507: note = n indicates cytidine, 5-methylcytidine, or 5-hydroxymethylcytidine
  misc_difference 7513: note = n indicates cytidine, 5-methylcytidine, or 5-hydroxymethylcytidine
  misc_difference 7515: note = n indicates cytidine, 5-methylcytidine, or 5-hydroxymethylcytidine
  misc_difference 7517: note = n indicates cytidine, 5-methylcytidine, or 5-hydroxymethylcytidine
  misc_difference 7520: note = n indicates cytidine, 5-methylcytidine, or 5-hydroxymethylcytidine
  misc_difference 7523: note = n indicates cytidine, 5-methylcytidine, or 5-hydroxymethylcytidine
  misc_difference 7527: note = n indicates cytidine, 5-methylcytidine, or 5-hydroxymethylcytidine
  misc_difference 7528: note = n indicates cytidine, 5-methylcytidine, or 5-hydroxymethylcytidine
  misc_difference 7537: note = n indicates cytidine, 5-methylcytidine, or 5-hydroxymethylcytidine
  misc_difference 7540: note = n indicates cytidine, 5-methylcytidine, or 5-hydroxymethylcytidine
  misc_difference 7543: note = n indicates cytidine, 5-methylcytidine, or 5-hydroxymethylcytidine
  misc_difference 7549: note = n indicates cytidine, 5-methylcytidine, or 5-hydroxymethylcytidine
  misc_difference 7554: note = n indicates cytidine, 5-methylcytidine, or 5-hydroxymethylcytidine
  misc_difference 7555: note = n indicates cytidine, 5-methylcytidine, or 5-hydroxymethylcytidine
  misc_difference 7557: note = n indicates cytidine, 5-methylcytidine, or 5-hydroxymethylcytidine
  misc_difference 7558: note = n indicates cytidine, 5-methylcytidine, or 5-hydroxymethylcytidine
  misc_difference 7563: note = n indicates cytidine, 5-methylcytidine, or 5-hydroxymethylcytidine
  misc_difference 7567: note = n indicates cytidine, 5-methylcytidine, or 5-hydroxymethylcytidine
  misc_difference 7576: note = n indicates cytidine, 5-methylcytidine, or 5-hydroxymethylcytidine
  misc_difference 7577: note = n indicates cytidine, 5-methylcytidine, or 5-hydroxymethylcytidine
  misc_difference 7578: note = n indicates cytidine, 5-methylcytidine, or 5-hydroxymethylcytidine
  misc_difference 7581: note = n indicates cytidine, 5-methylcytidine, or 5-hydroxymethylcytidine
  misc_difference 7582: note = n indicates cytidine, 5-methylcytidine, or 5-hydroxymethylcytidine
  misc_difference 7584: note = n indicates cytidine, 5-methylcytidine, or 5-hydroxymethylcytidine
  misc_difference 7585: note = n indicates cytidine, 5-methylcytidine, or 5-hydroxymethylcytidine
  misc_difference 7594: note = n indicates cytidine, 5-methylcytidine, or 5-hydroxymethylcytidine
  misc_difference 7595: note = n indicates cytidine, 5-methylcytidine, or 5-hydroxymethylcytidine
  misc_difference 7600: note = n indicates cytidine, 5-methylcytidine, or 5-hydroxymethylcytidine
  misc_difference 7601: note = n indicates cytidine, 5-methylcytidine, or 5-hydroxymethylcytidine
  misc_difference 7603: note = n indicates cytidine, 5-methylcytidine, or 5-hydroxymethylcytidine
  misc_difference 7604: note = n indicates cytidine, 5-methylcytidine, or 5-hydroxymethylcytidine
  misc_difference 7605: note = n indicates cytidine, 5-methylcytidine, or 5-hydroxymethylcytidine
  misc_difference 7611: note = n indicates cytidine, 5-methylcytidine, or 5-hydroxymethylcytidine
  misc_difference 7625: note = n indicates cytidine, 5-methylcytidine, or 5-hydroxymethylcytidine
  misc_difference 7631: note = n indicates cytidine, 5-methylcytidine, or 5-hydroxymethylcytidine
  misc_difference 7643: note = n indicates cytidine, 5-methylcytidine, or 5-hydroxymethylcytidine
  misc_difference 7648: note = n indicates cytidine, 5-methylcytidine, or 5-hydroxymethylcytidine
  misc_difference 7649: note = n indicates cytidine, 5-methylcytidine, or 5-hydroxymethylcytidine
  misc_difference 7652: note = n indicates cytidine, 5-methylcytidine, or 5-hydroxymethylcytidine
  misc_difference 7655: note = n indicates cytidine, 5-methylcytidine, or 5-hydroxymethylcytidine
  misc_difference 7664: note = n indicates cytidine, 5-methylcytidine, or 5-hydroxymethylcytidine
  misc_difference 7668: note = n indicates cytidine, 5-methylcytidine, or 5-hydroxymethylcytidine
  misc_difference 7670: note = n indicates cytidine, 5-methylcytidine, or 5-hydroxymethylcytidine
  misc_difference 7673: note = n indicates cytidine, 5-methylcytidine, or 5-hydroxymethylcytidine
  misc_difference 7680: note = n indicates cytidine, 5-methylcytidine, or 5-hydroxymethylcytidine
  misc_difference 7682: note = n indicates cytidine, 5-methylcytidine, or 5-hydroxymethylcytidine
  misc_difference 7691: note = n indicates cytidine, 5-methylcytidine, or 5-hydroxymethylcytidine
  misc_difference 7693: note = n indicates cytidine, 5-methylcytidine, or 5-hydroxymethylcytidine
  misc_difference 7694: note = n indicates cytidine, 5-methylcytidine, or 5-hydroxymethylcytidine
  misc_difference 7700: note = n indicates cytidine, 5-methylcytidine, or 5-hydroxymethylcytidine
  misc_difference 7703: note = n indicates cytidine, 5-methylcytidine, or 5-hydroxymethylcytidine
  misc_difference 7704: note = n indicates cytidine, 5-methylcytidine, or 5-hydroxymethylcytidine
  misc_difference 7706: note = n indicates cytidine, 5-methylcytidine, or 5-hydroxymethylcytidine
  misc_difference 7712: note = n indicates cytidine, 5-methylcytidine, or 5-hydroxymethylcytidine
  misc_difference 7718: note = n indicates cytidine, 5-methylcytidine, or 5-hydroxymethylcytidine
  misc_difference 7724: note = n indicates cytidine, 5-methylcytidine, or 5-hydroxymethylcytidine
  misc_difference 7730: note = n indicates cytidine, 5-methylcytidine, or 5-hydroxymethylcytidine
  misc_difference 7736: note = n indicates cytidine, 5-methylcytidine, or 5-hydroxymethylcytidine
  misc_difference 7737: note = n indicates cytidine, 5-methylcytidine, or 5-hydroxymethylcytidine
  misc_difference 7739: note = n indicates cytidine, 5-methylcytidine, or 5-hydroxymethylcytidine
  misc_difference 7740: note = n indicates cytidine, 5-methylcytidine, or 5-hydroxymethylcytidine
  misc_difference 7741: note = n indicates cytidine, 5-methylcytidine, or 5-hydroxymethylcytidine
  misc_difference 7742: note = n indicates cytidine, 5-methylcytidine, or 5-hydroxymethylcytidine
  misc_difference 7745: note = n indicates cytidine, 5-methylcytidine, or 5-hydroxymethylcytidine
  misc_difference 7751: note = n indicates cytidine, 5-methylcytidine, or 5-hydroxymethylcytidine
  misc_difference 7753: note = n indicates cytidine, 5-methylcytidine, or 5-hydroxymethylcytidine
  misc_difference 7754: note = n indicates cytidine, 5-methylcytidine, or 5-hydroxymethylcytidine
  misc_difference 7755: note = n indicates cytidine, 5-methylcytidine, or 5-hydroxymethylcytidine
  misc_difference 7759: note = n indicates cytidine, 5-methylcytidine, or 5-hydroxymethylcytidine
  misc_difference 7760: note = n indicates cytidine, 5-methylcytidine, or 5-hydroxymethylcytidine
  misc_difference 7762: note = n indicates cytidine, 5-methylcytidine, or 5-hydroxymethylcytidine
  misc_difference 7763: note = n indicates cytidine, 5-methylcytidine, or 5-hydroxymethylcytidine
  misc_difference 7767: note = n indicates cytidine, 5-methylcytidine, or 5-hydroxymethylcytidine
  misc_difference 7777: note = n indicates cytidine, 5-methylcytidine, or 5-hydroxymethylcytidine
  misc_difference 7778: note = n indicates cytidine, 5-methylcytidine, or 5-hydroxymethylcytidine
  misc_difference 7787: note = n indicates cytidine, 5-methylcytidine, or 5-hydroxymethylcytidine
  misc_difference 7788: note = n indicates cytidine, 5-methylcytidine, or 5-hydroxymethylcytidine
  misc_difference 7789: note = n indicates cytidine, 5-methylcytidine, or 5-hydroxymethylcytidine
  misc_difference 7790: note = n indicates cytidine, 5-methylcytidine, or 5-hydroxymethylcytidine
  misc_difference 7791: note = n indicates cytidine, 5-methylcytidine, or 5-hydroxymethylcytidine
  misc_difference 7794: note = n indicates cytidine, 5-methylcytidine, or 5-hydroxymethylcytidine
  misc_difference 7795: note = n indicates cytidine, 5-methylcytidine, or 5-hydroxymethylcytidine
  misc_difference 7796: note = n indicates cytidine, 5-methylcytidine, or 5-hydroxymethylcytidine
  misc_difference 7799: note = n indicates cytidine, 5-methylcytidine, or 5-hydroxymethylcytidine
  misc_difference 7801: note = n indicates cytidine, 5-methylcytidine, or 5-hydroxymethylcytidine
  misc_difference 7802: note = n indicates cytidine, 5-methylcytidine, or 5-hydroxymethylcytidine
  misc_difference 7808: note = n indicates cytidine, 5-methylcytidine, or 5-hydroxymethylcytidine
  misc_difference 7811: note = n indicates cytidine, 5-methylcytidine, or 5-hydroxymethylcytidine
  misc_difference 7812: note = n indicates cytidine, 5-methylcytidine, or 5-hydroxymethylcytidine
  misc_difference 7816: note = n indicates cytidine, 5-methylcytidine, or 5-hydroxymethylcytidine
  misc_difference 7817: note = n indicates cytidine, 5-methylcytidine, or 5-hydroxymethylcytidine
  misc_difference 7818: note = n indicates cytidine, 5-methylcytidine, or 5-hydroxymethylcytidine
  misc_difference 7819: note = n indicates cytidine, 5-methylcytidine, or 5-hydroxymethylcytidine
  misc_difference 7821: note = n indicates cytidine, 5-methylcytidine, or 5-hydroxymethylcytidine
  misc_difference 7826: note = n indicates cytidine, 5-methylcytidine, or 5-hydroxymethylcytidine
  misc_difference 7832: note = n indicates cytidine, 5-methylcytidine, or 5-hydroxymethylcytidine
  misc_difference 7835: note = n indicates cytidine, 5-methylcytidine, or 5-hydroxymethylcytidine
  misc_difference 7837: note = n indicates cytidine, 5-methylcytidine, or 5-hydroxymethylcytidine
  misc_difference 7838: note = n indicates cytidine, 5-methylcytidine, or 5-hydroxymethylcytidine
  misc_difference 7843: note = n indicates cytidine, 5-methylcytidine, or 5-hydroxymethylcytidine
  misc_difference 7844: note = n indicates cytidine, 5-methylcytidine, or 5-hydroxymethylcytidine
  misc_difference 7847: note = n indicates cytidine, 5-methylcytidine, or 5-hydroxymethylcytidine
  misc_difference 7854: note = n indicates cytidine, 5-methylcytidine, or 5-hydroxymethylcytidine
  misc_difference 7856: note = n indicates cytidine, 5-methylcytidine, or 5-hydroxymethylcytidine
  misc_difference 7857: note = n indicates cytidine, 5-methylcytidine, or 5-hydroxymethylcytidine
  misc_difference 7858: note = n indicates cytidine, 5-methylcytidine, or 5-hydroxymethylcytidine
  misc_difference 7859: note = n indicates cytidine, 5-methylcytidine, or 5-hydroxymethylcytidine
  misc_difference 7861: note = n indicates cytidine, 5-methylcytidine, or 5-hydroxymethylcytidine
  misc_difference 7862: note = n indicates cytidine, 5-methylcytidine, or 5-hydroxymethylcytidine
  misc_difference 7865: note = n indicates cytidine, 5-methylcytidine, or 5-hydroxymethylcytidine
  misc_difference 7868: note = n indicates cytidine, 5-methylcytidine, or 5-hydroxymethylcytidine
  misc_difference 7869: note = n indicates cytidine, 5-methylcytidine, or 5-hydroxymethylcytidine
  misc_difference 7870: note = n indicates cytidine, 5-methylcytidine, or 5-hydroxymethylcytidine
  misc_difference 7871: note = n indicates cytidine, 5-methylcytidine, or 5-hydroxymethylcytidine
  misc_difference 7874: note = n indicates cytidine, 5-methylcytidine, or 5-hydroxymethylcytidine
  misc_difference 7877: note = n indicates cytidine, 5-methylcytidine, or 5-hydroxymethylcytidine
  misc_difference 7884: note = n indicates cytidine, 5-methylcytidine, or 5-hydroxymethylcytidine
  misc_difference 7888: note = n indicates cytidine, 5-methylcytidine, or 5-hydroxymethylcytidine
  misc_difference 7889: note = n indicates cytidine, 5-methylcytidine, or 5-hydroxymethylcytidine
  misc_difference 7892: note = n indicates cytidine, 5-methylcytidine, or 5-hydroxymethylcytidine
  misc_difference 7893: note = n indicates cytidine, 5-methylcytidine, or 5-hydroxymethylcytidine
  misc_difference 7894: note = n indicates cytidine, 5-methylcytidine, or 5-hydroxymethylcytidine
  misc_difference 7895: note = n indicates cytidine, 5-methylcytidine, or 5-hydroxymethylcytidine
  misc_difference 7901: note = n indicates cytidine, 5-methylcytidine, or 5-hydroxymethylcytidine
  misc_difference 7904: note = n indicates cytidine, 5-methylcytidine, or 5-hydroxymethylcytidine
  misc_difference 7914: note = n indicates cytidine, 5-methylcytidine, or 5-hydroxymethylcytidine
  misc_difference 7916: note = n indicates cytidine, 5-methylcytidine, or 5-hydroxymethylcytidine
  misc_difference 7925: note = n indicates cytidine, 5-methylcytidine, or 5-hydroxymethylcytidine
  misc_difference 7928: note = n indicates cytidine, 5-methylcytidine, or 5-hydroxymethylcytidine
  misc_difference 7934: note = n indicates cytidine, 5-methylcytidine, or 5-hydroxymethylcytidine
  misc_difference 7937: note = n indicates cytidine, 5-methylcytidine, or 5-hydroxymethylcytidine
  misc_difference 7940: note = n indicates cytidine, 5-methylcytidine, or 5-hydroxymethylcytidine
  misc_difference 7948: note = n indicates cytidine, 5-methylcytidine, or 5-hydroxymethylcytidine
  misc_difference 7949: note = n indicates cytidine, 5-methylcytidine, or 5-hydroxymethylcytidine
  misc_difference 7954: note = n indicates cytidine, 5-methylcytidine, or 5-hydroxymethylcytidine
  misc_difference 7955: note = n indicates cytidine, 5-methylcytidine, or 5-hydroxymethylcytidine
  misc_difference 7956: note = n indicates cytidine, 5-methylcytidine, or 5-hydroxymethylcytidine
  misc_difference 7961: note = n indicates cytidine, 5-methylcytidine, or 5-hydroxymethylcytidine
  misc_difference 7963: note = n indicates cytidine, 5-methylcytidine, or 5-hydroxymethylcytidine
  misc_difference 7964: note = n indicates cytidine, 5-methylcytidine, or 5-hydroxymethylcytidine
  misc_difference 7966: note = n indicates cytidine, 5-methylcytidine, or 5-hydroxymethylcytidine
  misc_difference 7967: note = n indicates cytidine, 5-methylcytidine, or 5-hydroxymethylcytidine
  misc_difference 7968: note = n indicates cytidine, 5-methylcytidine, or 5-hydroxymethylcytidine
  misc_difference 7971: note = n indicates cytidine, 5-methylcytidine, or 5-hydroxymethylcytidine
  misc_difference 7976: note = n indicates cytidine, 5-methylcytidine, or 5-hydroxymethylcytidine
  misc_difference 7979: note = n indicates cytidine, 5-methylcytidine, or 5-hydroxymethylcytidine
  misc_difference 7985: note = n indicates cytidine, 5-methylcytidine, or 5-hydroxymethylcytidine
  misc_difference 7988: note = n indicates cytidine, 5-methylcytidine, or 5-hydroxymethylcytidine
  misc_difference 7991: note = n indicates cytidine, 5-methylcytidine, or 5-hydroxymethylcytidine
  misc_difference 8001: note = n indicates cytidine, 5-methylcytidine, or 5-hydroxymethylcytidine
  misc_difference 8004: note = n indicates cytidine, 5-methylcytidine, or 5-hydroxymethylcytidine
  misc_difference 8006: note = n indicates cytidine, 5-methylcytidine, or 5-hydroxymethylcytidine
  misc_difference 8009: note = n indicates cytidine, 5-methylcytidine, or 5-hydroxymethylcytidine
  misc_difference 8011: note = n indicates cytidine, 5-methylcytidine, or 5-hydroxymethylcytidine
  misc_difference 8012: note = n indicates cytidine, 5-methylcytidine, or 5-hydroxymethylcytidine
  misc_difference 8015: note = n indicates cytidine, 5-methylcytidine, or 5-hydroxymethylcytidine
  misc_difference 8018: note = n indicates cytidine, 5-methylcytidine, or 5-hydroxymethylcytidine
  misc_difference 8019: note = n indicates cytidine, 5-methylcytidine, or 5-hydroxymethylcytidine
  misc_difference 8020: note = n indicates cytidine, 5-methylcytidine, or 5-hydroxymethylcytidine
  misc_difference 8021: note = n indicates cytidine, 5-methylcytidine, or 5-hydroxymethylcytidine
  misc_difference 8023: note = n indicates cytidine, 5-methylcytidine, or 5-hydroxymethylcytidine
  misc_difference 8024: note = n indicates cytidine, 5-methylcytidine, or 5-hydroxymethylcytidine
  misc_difference 8027: note = n indicates cytidine, 5-methylcytidine, or 5-hydroxymethylcytidine
  misc_difference 8030: note = n indicates cytidine, 5-methylcytidine, or 5-hydroxymethylcytidine
  misc_difference 8031: note = n indicates cytidine, 5-methylcytidine, or 5-hydroxymethylcytidine
  misc_difference 8032: note = n indicates cytidine, 5-methylcytidine, or 5-hydroxymethylcytidine
  misc_difference 8033: note = n indicates cytidine, 5-methylcytidine, or 5-hydroxymethylcytidine
  misc_difference 8040: note = n indicates cytidine, 5-methylcytidine, or 5-hydroxymethylcytidine
  misc_difference 8050: note = n indicates cytidine, 5-methylcytidine, or 5-hydroxymethylcytidine
  misc_difference 8051: note = n indicates cytidine, 5-methylcytidine, or 5-hydroxymethylcytidine
  misc_difference 8057: note = n indicates cytidine, 5-methylcytidine, or 5-hydroxymethylcytidine
  misc_difference 8065: note = n indicates cytidine, 5-methylcytidine, or 5-hydroxymethylcytidine
  misc_difference 8066: note = n indicates cytidine, 5-methylcytidine, or 5-hydroxymethylcytidine
  misc_difference 8068: note = n indicates cytidine, 5-methylcytidine, or 5-hydroxymethylcytidine
  misc_difference 8069: note = n indicates cytidine, 5-methylcytidine, or 5-hydroxymethylcytidine
  misc_difference 8071: note = n indicates cytidine, 5-methylcytidine, or 5-hydroxymethylcytidine
  misc_difference 8072: note = n indicates cytidine, 5-methylcytidine, or 5-hydroxymethylcytidine
  misc_difference 8076: note = n indicates cytidine, 5-methylcytidine, or 5-hydroxymethylcytidine
  misc_difference 8084: note = n indicates cytidine, 5-methylcytidine, or 5-hydroxymethylcytidine
  misc_difference 8085: note = n indicates cytidine, 5-methylcytidine, or 5-hydroxymethylcytidine
  misc_difference 8086: note = n indicates cytidine, 5-methylcytidine, or 5-hydroxymethylcytidine
  misc_difference 8087: note = n indicates cytidine, 5-methylcytidine, or 5-hydroxymethylcytidine
  misc_difference 8093: note = n indicates cytidine, 5-methylcytidine, or 5-hydroxymethylcytidine
  misc_difference 8096: note = n indicates cytidine, 5-methylcytidine, or 5-hydroxymethylcytidine
  misc_difference 8098: note = n indicates cytidine, 5-methylcytidine, or 5-hydroxymethylcytidine
  misc_difference 8099: note = n indicates cytidine, 5-methylcytidine, or 5-hydroxymethylcytidine
  misc_difference 8100: note = n indicates cytidine, 5-methylcytidine, or 5-hydroxymethylcytidine
  misc_difference 8108: note = n indicates cytidine, 5-methylcytidine, or 5-hydroxymethylcytidine
  misc_difference 8114: note = n indicates cytidine, 5-methylcytidine, or 5-hydroxymethylcytidine
  misc_difference 8118: note = n indicates cytidine, 5-methylcytidine, or 5-hydroxymethylcytidine
  misc_difference 8124: note = n indicates cytidine, 5-methylcytidine, or 5-hydroxymethylcytidine
  misc_difference 8130: note = n indicates cytidine, 5-methylcytidine, or 5-hydroxymethylcytidine
  misc_difference 8138: note = n indicates cytidine, 5-methylcytidine, or 5-hydroxymethylcytidine
  misc_difference 8141: note = n indicates cytidine, 5-methylcytidine, or 5-hydroxymethylcytidine
  misc_difference 8144: note = n indicates cytidine, 5-methylcytidine, or 5-hydroxymethylcytidine
  misc_difference 8145: note = n indicates cytidine, 5-methylcytidine, or 5-hydroxymethylcytidine
  misc_difference 8147: note = n indicates cytidine, 5-methylcytidine, or 5-hydroxymethylcytidine
  misc_difference 8150: note = n indicates cytidine, 5-methylcytidine, or 5-hydroxymethylcytidine
  misc_difference 8153: note = n indicates cytidine, 5-methylcytidine, or 5-hydroxymethylcytidine
  misc_difference 8155: note = n indicates cytidine, 5-methylcytidine, or 5-hydroxymethylcytidine
  misc_difference 8162: note = n indicates cytidine, 5-methylcytidine, or 5-hydroxymethylcytidine
  misc_difference 8167: note = n indicates cytidine, 5-methylcytidine, or 5-hydroxymethylcytidine
  misc_difference 8168: note = n indicates cytidine, 5-methylcytidine, or 5-hydroxymethylcytidine
  misc_difference 8170: note = n indicates cytidine, 5-methylcytidine, or 5-hydroxymethylcytidine
  misc_difference 8171: note = n indicates cytidine, 5-methylcytidine, or 5-hydroxymethylcytidine
  misc_difference 8174: note = n indicates cytidine, 5-methylcytidine, or 5-hydroxymethylcytidine
  misc_difference 8179: note = n indicates cytidine, 5-methylcytidine, or 5-hydroxymethylcytidine
  misc_difference 8180: note = n indicates cytidine, 5-methylcytidine, or 5-hydroxymethylcytidine
  misc_difference 8187: note = n indicates cytidine, 5-methylcytidine, or 5-hydroxymethylcytidine
  misc_difference 8188: note = n indicates cytidine, 5-methylcytidine, or 5-hydroxymethylcytidine
  misc_difference 8189: note = n indicates cytidine, 5-methylcytidine, or 5-hydroxymethylcytidine
  misc_difference 8193: note = n indicates cytidine, 5-methylcytidine, or 5-hydroxymethylcytidine
  misc_difference 8196: note = n indicates cytidine, 5-methylcytidine, or 5-hydroxymethylcytidine
  misc_difference 8199: note = n indicates cytidine, 5-methylcytidine, or 5-hydroxymethylcytidine
  misc_difference 8200: note = n indicates cytidine, 5-methylcytidine, or 5-hydroxymethylcytidine
  misc_difference 8201: note = n indicates cytidine, 5-methylcytidine, or 5-hydroxymethylcytidine
  misc_difference 8204: note = n indicates cytidine, 5-methylcytidine, or 5-hydroxymethylcytidine
  misc_difference 8206: note = n indicates cytidine, 5-methylcytidine, or 5-hydroxymethylcytidine
  misc_difference 8207: note = n indicates cytidine, 5-methylcytidine, or 5-hydroxymethylcytidine
  misc_difference 8210: note = n indicates cytidine, 5-methylcytidine, or 5-hydroxymethylcytidine
  misc_difference 8213: note = n indicates cytidine, 5-methylcytidine, or 5-hydroxymethylcytidine
  misc_difference 8216: note = n indicates cytidine, 5-methylcytidine, or 5-hydroxymethylcytidine
  misc_difference 8219: note = n indicates cytidine, 5-methylcytidine, or 5-hydroxymethylcytidine
  misc_difference 8222: note = n indicates cytidine, 5-methylcytidine, or 5-hydroxymethylcytidine
  misc_difference 8231: note = n indicates cytidine, 5-methylcytidine, or 5-hydroxymethylcytidine
  misc_difference 8234: note = n indicates cytidine, 5-methylcytidine, or 5-hydroxymethylcytidine
  misc_difference 8236: note = n indicates cytidine, 5-methylcytidine, or 5-hydroxymethylcytidine
  misc_difference 8237: note = n indicates cytidine, 5-methylcytidine, or 5-hydroxymethylcytidine
  misc_difference 8239: note = n indicates cytidine, 5-methylcytidine, or 5-hydroxymethylcytidine
  misc_difference 8240: note = n indicates cytidine, 5-methylcytidine, or 5-hydroxymethylcytidine
  misc_difference 8241: note = n indicates cytidine, 5-methylcytidine, or 5-hydroxymethylcytidine
  misc_difference 8243: note = n indicates cytidine, 5-methylcytidine, or 5-hydroxymethylcytidine
  misc_difference 8246: note = n indicates cytidine, 5-methylcytidine, or 5-hydroxymethylcytidine
  misc_difference 8252: note = n indicates cytidine, 5-methylcytidine, or 5-hydroxymethylcytidine
  misc_difference 8255: note = n indicates cytidine, 5-methylcytidine, or 5-hydroxymethylcytidine
  misc_difference 8257: note = n indicates cytidine, 5-methylcytidine, or 5-hydroxymethylcytidine
  misc_difference 8258: note = n indicates cytidine, 5-methylcytidine, or 5-hydroxymethylcytidine
  misc_difference 8261: note = n indicates cytidine, 5-methylcytidine, or 5-hydroxymethylcytidine
  misc_difference 8268: note = n indicates cytidine, 5-methylcytidine, or 5-hydroxymethylcytidine
  misc_difference 8273: note = n indicates cytidine, 5-methylcytidine, or 5-hydroxymethylcytidine
  misc_difference 8277: note = n indicates cytidine, 5-methylcytidine, or 5-hydroxymethylcytidine
  misc_difference 8279: note = n indicates cytidine, 5-methylcytidine, or 5-hydroxymethylcytidine
  misc_difference 8281: note = n indicates cytidine, 5-methylcytidine, or 5-hydroxymethylcytidine
  misc_difference 8282: note = n indicates cytidine, 5-methylcytidine, or 5-hydroxymethylcytidine
  misc_difference 8288: note = n indicates cytidine, 5-methylcytidine, or 5-hydroxymethylcytidine
  misc_difference 8289: note = n indicates cytidine, 5-methylcytidine, or 5-hydroxymethylcytidine
  misc_difference 8291: note = n indicates cytidine, 5-methylcytidine, or 5-hydroxymethylcytidine
  misc_difference 8292: note = n indicates cytidine, 5-methylcytidine, or 5-hydroxymethylcytidine
  misc_difference 8294: note = n indicates cytidine, 5-methylcytidine, or 5-hydroxymethylcytidine
  misc_difference 8296: note = n indicates cytidine, 5-methylcytidine, or 5-hydroxymethylcytidine
  misc_difference 8297: note = n indicates cytidine, 5-methylcytidine, or 5-hydroxymethylcytidine
  misc_difference 8299: note = n indicates cytidine, 5-methylcytidine, or 5-hydroxymethylcytidine
  misc_difference 8300: note = n indicates cytidine, 5-methylcytidine, or 5-hydroxymethylcytidine
  misc_difference 8303: note = n indicates cytidine, 5-methylcytidine, or 5-hydroxymethylcytidine
  misc_difference 8306: note = n indicates cytidine, 5-methylcytidine, or 5-hydroxymethylcytidine
  misc_difference 8312: note = n indicates cytidine, 5-methylcytidine, or 5-hydroxymethylcytidine
  misc_difference 8316: note = n indicates cytidine, 5-methylcytidine, or 5-hydroxymethylcytidine
  misc_difference 8321: note = n indicates cytidine, 5-methylcytidine, or 5-hydroxymethylcytidine
  misc_difference 8331: note = n indicates cytidine, 5-methylcytidine, or 5-hydroxymethylcytidine
  misc_difference 8344: note = n indicates cytidine, 5-methylcytidine, or 5-hydroxymethylcytidine
  misc_difference 8348: note = n indicates cytidine, 5-methylcytidine, or 5-hydroxymethylcytidine
  misc_difference 8351: note = n indicates cytidine, 5-methylcytidine, or 5-hydroxymethylcytidine
  misc_difference 8355: note = n indicates cytidine, 5-methylcytidine, or 5-hydroxymethylcytidine
  misc_difference 8362: note = n indicates cytidine, 5-methylcytidine, or 5-hydroxymethylcytidine
  misc_difference 8364: note = n indicates cytidine, 5-methylcytidine, or 5-hydroxymethylcytidine
  misc_difference 8366: note = n indicates cytidine, 5-methylcytidine, or 5-hydroxymethylcytidine
  misc_difference 8369: note = n indicates cytidine, 5-methylcytidine, or 5-hydroxymethylcytidine
  misc_difference 8376: note = n indicates cytidine, 5-methylcytidine, or 5-hydroxymethylcytidine
  misc_difference 8380: note = n indicates cytidine, 5-methylcytidine, or 5-hydroxymethylcytidine
  misc_difference 8381: note = n indicates cytidine, 5-methylcytidine, or 5-hydroxymethylcytidine
  misc_difference 8383: note = n indicates cytidine, 5-methylcytidine, or 5-hydroxymethylcytidine
  misc_difference 8384: note = n indicates cytidine, 5-methylcytidine, or 5-hydroxymethylcytidine
  misc_difference 8408: note = n indicates cytidine, 5-methylcytidine, or 5-hydroxymethylcytidine
  misc_difference 8413: note = n indicates cytidine, 5-methylcytidine, or 5-hydroxymethylcytidine
  misc_difference 8418: note = n indicates cytidine, 5-methylcytidine, or 5-hydroxymethylcytidine
  misc_difference 8419: note = n indicates cytidine, 5-methylcytidine, or 5-hydroxymethylcytidine
  misc_difference 8424: note = n indicates cytidine, 5-methylcytidine, or 5-hydroxymethylcytidine
  misc_difference 8445: note = n indicates cytidine, 5-methylcytidine, or 5-hydroxymethylcytidine
atgggnggngnatgagagaagnnnagannaattanntannnaaaatggagaaagttnangttganatngaggaaganagnnnattnntnagagntttgnagnggagnttnnngnagtttgaggtagaagnnaagnaggtnantgataatgannatgntaatgnnagagngttttngnatntggnttnaaaantgatngaaanggaggtggannnatnnganangatnnttganattggaagtgngnnngnnngnagaatgtattntaagnanaagtatnattgtatntgtnngatgagatgtgnggaagatnngganagattgtataagtatgnaantaagntgaagaaaaantgtaaggaaataantgataaggaattgganaagaaaatgaaggagntggnngnngtnatgagngannntganntggaaantgagantatgtgnntnnangangangagtngtgtngntangaagggnaagtngntgtttannaggatgtatangnggttganggannganaagtntntatnannaagnnaataagggagttagagtngnntantggataggntttganannannnnttttatgtttaagaanttggntggagnatatnnatnatantntannaantgggnngangaaanngtgttaanggntngtaanataggnntatgnagntntgangttatggagnggtnangtagagggatgtnnattnttagaaagaagtatttgaaannatnnaanaatgttntattntntgttggntngannatntannangagaagaggganttantgaggagntggnanntgnngtntgtatttnanttangtggnaagnaaaattananatgtnggtgtgagantatagttagttgngangggtangtngttaaaagaatagntatnagtnnaggnntgtatgggaagnnttnaggntatgntgntangatgnanngngagggattnttgtgntgnaaagtganagananattgaanggggagagggtntnttttnnngtgtgnangtatgtgnnagntanattgtgtgannaaatgantggnatantggnaanagatgtnagtgnggangangngnaaaaantgntggttgggntnaannagngtatagtngtnaanggtngnannnagagaaanannaatannatgaaaaattannttttgnnngtagtggnnnaggnatttgntaggtgggnaaaggaatataaggaagatnaagaagatgaaaggnnantaggantangagataganagttagtnatggggtgttgttgggnttttagaaggnanaagataanatntatttataagngnnnggatannnaaannatnatnaaagtgaanagngatttnnantnattngtgntgnnnaggataggnagtaananattggagatngggntgagaanaagaatnaggaaaatgttagaggagnanaaggagnngtnanntntnattanngnngaggangtanaagaagntaagtgngnagnngatgaggntaaggaggtgngtgaagnngaggagttgngngnagntntannanntttggnagntgatgttgaggagnnnantntggaggnagangtnganttgatgttanaagaggntggggnnggntnagtggagananntngtggnttgataaaggttannagntangatggngagganaagatnggntnttangntgtgntttntnngnaggntgtantnaagagtgaaaaattatnttgnatnnannntntngntgaanaagtnatagtgataananantntggnngaaaagggngttatgnngtggaannatannatggtaaagtagtggtgnnagaggganatgnaatannngtnnaggantttnaagntntgagtgaaagtgnnannattgtgtanaangaangtgagttngtaaanaggtanntgnannatattgnnananatggaggagngntgaanantgatgaagaatattanaaaantgtnaagnnnagngagnanganggngaatanntgtanganatnganaggaaanagtgngtnaagaaagaantagtnantgggntagggntnanaggngagntggtggatnntnnnttnnatgaattngnntangagagtntgagaanangannagnngntnnttannaagtannaannataggggtgtatggngtgnnaggatnaggnaagtntggnatnattaaaagngnagtnannaaaaaagatntagtggtgagngnnaagaaagaaaantgtgnagaaattataagggangtnaagaaaatgaaagggntggangtnaatgnnagaantgtggantnagtgntnttgaatggatgnaaanannnngtagagannntgtatattgangaagnttttgnttgtnatgnaggtantntnagagngntnatagnnattataaganntaaaaaggnagtgntntgnggggatnnnaaanagtgnggtttttttaanatgatgtgnntgaaagtgnattttaannangagatttgnananaagtnttnnanaaaagnatntntngnngttgnantaaatntgtganttnggtngtntnaannttgttttanganaaaaaaatgagaangangaatnngaaagagantaagattgtgattganantannggnagtannaaanntaagnaggangatntnattntnanttgtttnagagggtgggtgaagnagttgnaaatagattanaaaggnaangaaataatganggnagntgnntntnaagggntgannngtaaaggtgtgtatgnngttnggtanaaggtgaatgaaaatnntntgtangnannnanntnagaanatgtgaangtnntantgannngnanggagganngnatngtgtggaaaanantagnnggngannnatggataaaaanantgantgnnaagtannntgggaatttnantgnnangatagaggagtggnaagnagagnatgatgnnatnatgaggnanatnttggagagannggannntanngangtnttnnagaataaggnaaangtgtgttgggnnaaggntttagtgnnggtgntgaaganngntggnataganatgannantgaanaatggaanantgtggattattttgaaangganaaagntnantnagnagagatagtattgaannaantatgngtgaggttntttggantngatntggantnnggtntattttntgnannnantgttnngttatnnattaggaataatnantgggataantnnnngtngnntaanatgtangggntgaataaagaagtggtnngtnagntntntngnaggtannnanaantgnntngggnagttgnnantggaagagtntatganatgaanantggtanantgngnaattatgatnngngnataaanntagtanntgtaaanagaagantgnntnatgntttagtnntnnannataatgaanannnanagagtganttttnttnattngtnagnaaattgaagggnagaantgtnntggtggtnggggaaaagttgtnngtnnnaggnaaaatggttgantggttgtnagannggnntgaggntannttnagagntnggntggatttaggnatnnnaggtgatgtgnnnaaatatganataatatttgttaatgtgaggannnnatataaatannatnantatnagnagtgtgaagannatgnnattaagnttagnatgttgannaagaaagnttgtntgnatntgaatnnnggnggaanntgtgtnagnataggttatggttangntganagggnnagngaaagnatnattggtgntatagngnggnagttnaagttttnnngggtatgnaaanngaaatnntnanttgaagaganggaagttntgtttgtattnattgggtangatngnaaggnnngtangnanaattnttanaagntttnatnaannttgannaanatttatanaggttnnagantnnangaagnnggatgtgnannntnatatnatgtggtgngaggggatattgnnanggnnanngaaggagtgattataaatgntgntaanagnaaagganaanntggnggaggggtgtgnggagngntgtataagaaattnnnggaaagnttngatttanagnngatngaagtaggaaaagngngantggtnaaaggtgnagntaaanatatnattnatgnngtaggannaaanttnaanaaagtttnggaggttgaaggtganaaanagttggnagaggnttatgagtnnatngntaagattgtnaangataanaattanaagtnagtagngattnnantgttgtnnannggnatnttttnngggaanaaagatngantaannnaatnattgaannatttgntganagntttaganannantgatgnagatgtagnnatatantgnaggganaagaaatgggaaatgantntnaaggaagnagtggntaggagagaagnagtggaggagatatgnatatnngangantnttnagtganagaanntgatgnagagntggtgagggtgnatnngaagagttntttggntggaaggaagggntanagnanaagngatggnaaaantttntnatatttggaagggannaagtttnannaggnggnnaaggatatagnagaaattaatgnnatgtggnnngttgnaanggaggnnaatgagnaggtatgnatgtatatnntnggagaaagnatgagnagtattaggtngaaatgnnnngtngaagagtnggaagnntnnanannanntagnangntgnnttgnttgtgnatnnatgnnatgantnnagaaagagtanagngnntaaaagnntnangtnnagaanaaattantgtgtgntnatnntttnnattgnngaagtatagaatnantggtgtgnagaagatnnaatgntnnnagnntatattgttntnanngaaagtgnntgngtatattnatnnaaggaagtatntngtggaaanannannggtagangagantnnggagnnatnggnagagaannaatnnanagaggggananntgaanaannannanttataanngaggatgagannaggantagaangnntgagnngatnatnatngaagaggaagaagaggatagnataagtttgntgtnagatggnnngannnannaggtgntgnaagtngaggnaganattnangggnngnnntntgtatntagntnatnntggtnnattnntnatgnatnngantttgatgtgganagtttatnnatanttganannntggagggagntagngtgannagnggggnaangtnagnngagantaantnttanttngnaaagagtatggagtttntggngngannggtgnntgngnntngaanagtattnaggaannntnnanatnnngntnngngnanaagaananngtnanttgnannnagnagggnntgntngagaannagnntagtttnnannnngnnaggngtgaatagggtgatnantagagaggagntngaggngnttannnngtnangnantnntagnaggtnggtntngagaannagnntggtntnnaannngnnaggngtaaatagggtgattanaagagaggagtttgaggngttngtagnanaanaanaatganggtttgatgngggtgnatanatnttttnntnnganannggtnaagggnatttanaanaaaaatnagtaaggnaaanggtgntatnngaagtggtgttggagagganngaattggagatttngtatgnnnngngnntngannaagaaaaagaagaattantangnaagaaattanagttaaatnnnananntgntaanagaagnagatannagtnnaggaaggtggagaanatgaaagnnataanagntagangtattntgnaaggnntagggnattatttgaaggnagaaggaaaagtggagtgntanngaannntgnatnntgttnntttgtattnatntagtgtgaanngtgnnttttnaagnnnnaaggtngnagtggaagnntgtaangnnatgttgaaagagaantttnngantgtggnttnttantgtattattnnagagtangatgnntatttgganatggttganggagnttnatgntgnttaganantgnnagtttttgnnntgnaaagntgngnagntttnnaaagaaanantnntatttggaannnanaatangatnggnagtgnnttnagngatnnagaanangntnnagaangtnntggnagntgnnanaaaaagaaattgnaatgtnangnaaatgagagaattgnnngtattggattnggnggnntttaatgtggaatgnttnaagaaatatgngtgtaataatgaatattgggaaangtttaaagaaaannnnatnaggnttantgaagaaaangtggtaaattanattannaaattaaaaggannaaaagntgntgntntttttgngaagananataatttgaatatgttgnagganatannaatgganaggtttgtaatgganttaaagagagangtgaaagtgantnnaggaanaaaanatantgaagaanggnnnaaggtanaggtgatnnaggntgnngatnngntagnaanagngtatntgtgnggaatnnanngagagntggttaggagattaaatgnggtnntgnttnngaanattnatanantgtttgatatgtnggntgaagantttgangntattatagnngagnanttnnagnntggggattgtgttntggaaantganatngngtngtttgataaaagtgaggangangnnatggntntganngngttaatgattntggaaganttaggtgtggangnagagntgttgangntgattgaggnggntttnggngaaatttnatnaatanatttgnnnantaaaantaaatttaaattnggagnnatgatgaaatntggaatgttnntnanantgtttgtgaananagtnattaanattgtaatngnaagnagagtgttgagagaanggntaannggatnannatgtgnagnattnattggagatganaatatngtgaaaggagtnaaatngganaaattaatggnaganaggtgngnnanntggttgaatatggaagtnaagattatagatgntgtggtgggngagaaagngnnttatttntgtggagggtttattttgtgtgantnngtgannggnanagngtgnngtgtggnagannnnntaaaaaggntgtttaagnttggnaaanntntggnagnagangatgaanatgatgatganaggagaagggnattgnatgaagagtnaanangntggaanngagtgggtattntttnagagntgtgnaaggnagtagaatnaaggtatgaaanngtaggaanttnnatnatagttatggnnatgantantntagntagnagtgttaaatnattnagntanntgagaggggnnnntataantntntanggntaanntgaatggantanganatagtntagtnngnnaagtntagnaggagagtnnnganntnnaggagagannagggnnannnttaagnttaagatggtgagnaagggngaggaggataanatggnnatnatnaaggagttnatgngnttnaaggtgnanatggagggntnngtgaanggnnangagttngagatngagggngagggngagggnngnnnntangagggnannnaganngnnaagntgaaggtgannaagggtggnnnnntgnnnttngnntggganatnntgtnnnntnagttnatgtanggntnnaaggnntangtgaagnannnngnnganatnnnngantanttgaagntgtnnttnnnngagggnttnaagtgggagngngtgatgaanttngagganggnggngtggtganngtgannnaggantnntnnntgnagganggngagttnatntanaaggtgaagntgngnggnannaanttnnnntnnganggnnnngtaatgnagaagaagannatgggntgggaggnntnntnngagnggatgtannnngagganggngnnntgaagggngagatnaagnagaggntgaagntgaagganggnggnnantangangntgaggtnaagannanntanaaggnnaagaagnnngtgnagntgnnnggngnntanaangtnaanatnaagttgganatnanntnnnanaangaggantanannatngtggaanagtangaangngnngagggnngnnantnnannggnggnatggangagntgtanaagtaataanatatggaattggnaagntgnttanatagaantngnggngattggnatgnngnnttaaaatttttattttattttttnttttnttttnngaatnggattttgtttttaatatttnaaaaaaaaaaaaaaaaaaaaaaaaaa

SEQ ID NO: 7 - RNA, 8471 nt, synthetic construct
  source 1..8471: mol_type = other RNA
  misc_difference 2: note = n indicates uridine, 5-methyluridine, or 5-hydroxymethyluridine
  misc_difference 13: note = n indicates uridine, 5-methyluridine, or 5-hydroxymethyluridine
  misc_difference 32: note = n indicates uridine, 5-methyluridine, or 5-hydroxymethyluridine
  misc_difference 33: note = n indicates uridine, 5-methyluridine, or 5-hydroxymethyluridine
  misc_difference 37: note = n indicates uridine, 5-methyluridine, or 5-hydroxymethyluridine
  misc_difference 46: note = n indicates uridine, 5-methyluridine, or 5-hydroxymethyluridine
  misc_difference 55: note = n indicates uridine, 5-methyluridine, or 5-hydroxymethyluridine
  misc_difference 56: note = n indicates uridine, 5-methyluridine, or 5-hydroxymethyluridine
  misc_difference 61: note = n indicates uridine, 5-methyluridine, or 5-hydroxymethyluridine
  misc_difference 62: note = n indicates uridine, 5-methyluridine, or 5-hydroxymethyluridine
  misc_difference 67: note = n indicates uridine, 5-methyluridine, or 5-hydroxymethyluridine
  misc_difference 84: note = n indicates uridine, 5-methyluridine, or 5-hydroxymethyluridine
  misc_difference 85: note = n indicates uridine, 5-methyluridine, or 5-hydroxymethyluridine
  misc_difference 88: note = n indicates uridine, 5-methyluridine, or 5-hydroxymethyluridine
  misc_difference 95: note = n indicates uridine, 5-methyluridine, or 5-hydroxymethyluridine
  misc_difference 96: note = n indicates uridine, 5-methyluridine, or 5-hydroxymethyluridine
  misc_difference 97: note = n indicates uridine, 5-methyluridine, or 5-hydroxymethyluridine
  misc_difference 108: note = n indicates uridine, 5-methyluridine, or 5-hydroxymethyluridine
  misc_difference 109: note = n indicates uridine, 5-methyluridine, or 5-hydroxymethyluridine
  misc_difference 117: note = n indicates uridine, 5-methyluridine, or 5-hydroxymethyluridine
  misc_difference 118: note = n indicates uridine, 5-methyluridine, or 5-hydroxymethyluridine
  misc_difference 119: note = n indicates uridine, 5-methyluridine, or 5-hydroxymethyluridine
  misc_difference 124: note = n indicates uridine, 5-methyluridine, or 5-hydroxymethyluridine
  misc_difference 139: note = n indicates uridine, 5-methyluridine, or 5-hydroxymethyluridine
  misc_difference 143: note = n indicates uridine, 5-methyluridine, or 5-hydroxymethyluridine
  misc_difference 146: note = n indicates uridine, 5-methyluridine, or 5-hydroxymethyluridine
  misc_difference 149: note = n indicates uridine, 5-methyluridine, or 5-hydroxymethyluridine
  misc_difference 155: note = n indicates uridine, 5-methyluridine, or 5-hydroxymethyluridine
  misc_difference 158: note = n indicates uridine, 5-methyluridine, or 5-hydroxymethyluridine
  misc_difference 161: note = n indicates uridine, 5-methyluridine, or 5-hydroxymethyluridine
  misc_difference 171: note = n indicates uridine, 5-methyluridine, or 5-hydroxymethyluridine
  misc_difference 172: note = n indicates uridine, 5-methyluridine, or 5-hydroxymethyluridine
  misc_difference 173: note = n indicates uridine, 5-methyluridine, or 5-hydroxymethyluridine
  misc_difference 174: note = n indicates uridine, 5-methyluridine, or 5-hydroxymethyluridine
  misc_difference 179: note = n indicates uridine, 5-methyluridine, or 5-hydroxymethyluridine
  misc_difference 181: note = n indicates uridine, 5-methyluridine, or 5-hydroxymethyluridine
  misc_difference 185: note = n indicates uridine, 5-methyluridine, or 5-hydroxymethyluridine
  misc_difference 186: note = n indicates uridine, 5-methyluridine, or 5-hydroxymethyluridine
  misc_difference 193: note = n indicates uridine, 5-methyluridine, or 5-hydroxymethyluridine
  misc_difference 196: note = n indicates uridine, 5-methyluridine, or 5-hydroxymethyluridine
  misc_difference 208: note = n indicates uridine, 5-methyluridine, or 5-hydroxymethyluridine
  misc_difference 216: note = n indicates uridine, 5-methyluridine, or 5-hydroxymethyluridine
  misc_difference 226: note = n indicates uridine, 5-methyluridine, or 5-hydroxymethyluridine
  misc_difference 229: note = n indicates uridine, 5-methyluridine, or 5-hydroxymethyluridine
  misc_difference 230: note = n indicates uridine, 5-methyluridine, or 5-hydroxymethyluridine
  misc_difference 235: note = n indicates uridine, 5-methyluridine, or 5-hydroxymethyluridine
  misc_difference 236: note = n indicates uridine, 5-methyluridine, or 5-hydroxymethyluridine
  misc_difference 242: note = n indicates uridine, 5-methyluridine, or 5-hydroxymethyluridine
  misc_difference 259: note = n indicates uridine, 5-methyluridine, or 5-hydroxymethyluridine
  misc_difference 261: note = n indicates uridine, 5-methyluridine, or 5-hydroxymethyluridine
  misc_difference 263: note = n indicates uridine, 5-methyluridine, or 5-hydroxymethyluridine
  misc_difference 264: note = n indicates uridine, 5-methyluridine, or 5-hydroxymethyluridine
  misc_difference 266: note = n indicates uridine, 5-methyluridine, or 5-hydroxymethyluridine
  misc_difference 276: note = n indicates uridine, 5-methyluridine, or 5-hydroxymethyluridine
  misc_difference 278: note = n indicates uridine, 5-methyluridine, or 5-hydroxymethyluridine
  misc_difference 281: note = n indicates uridine, 5-methyluridine, or 5-hydroxymethyluridine
  misc_difference 282: note = n indicates uridine, 5-methyluridine, or 5-hydroxymethyluridine
  misc_difference 284: note = n indicates uridine, 5-methyluridine, or 5-hydroxymethyluridine
  misc_difference 286: note = n indicates uridine, 5-methyluridine, or 5-hydroxymethyluridine
  misc_difference 288: note = n indicates uridine, 5-methyluridine, or 5-hydroxymethyluridine
  misc_difference 290: note = n indicates uridine, 5-methyluridine, or 5-hydroxymethyluridine
  misc_difference 295: note = n indicates uridine, 5-methyluridine, or 5-hydroxymethyluridine
  misc_difference 300: note = n indicates uridine, 5-methyluridine, or 5-hydroxymethyluridine
  misc_difference 302: note = n indicates uridine, 5-methyluridine, or 5-hydroxymethyluridine
  misc_difference 311: note = n indicates uridine, 5-methyluridine, or 5-hydroxymethyluridine
  misc_difference 321: note = n indicates uridine, 5-methyluridine, or 5-hydroxymethyluridine
  misc_difference 322: note = n indicates uridine, 5-methyluridine, or 5-hydroxymethyluridine
  misc_difference 324: note = n indicates uridine, 5-methyluridine, or 5-hydroxymethyluridine
  misc_difference 326: note = n indicates uridine, 5-methyluridine, or 5-hydroxymethyluridine
  misc_difference 330: note = n indicates uridine, 5-methyluridine, or 5-hydroxymethyluridine
  misc_difference 332: note = n indicates uridine, 5-methyluridine, or 5-hydroxymethyluridine
  misc_difference 338: note = n indicates uridine, 5-methyluridine, or 5-hydroxymethyluridine
  misc_difference 343: note = n indicates uridine, 5-methyluridine, or 5-hydroxymethyluridine
  misc_difference 354: note = n indicates uridine, 5-methyluridine, or 5-hydroxymethyluridine
  misc_difference 356: note = n indicates uridine, 5-methyluridine, or 5-hydroxymethyluridine
  misc_difference 364: note = n indicates uridine, 5-methyluridine, or 5-hydroxymethyluridine
  misc_difference 368: note = n indicates uridine, 5-methyluridine, or 5-hydroxymethyluridine
  misc_difference 371: note = n indicates uridine, 5-methyluridine, or 5-hydroxymethyluridine
  misc_difference 378: note = n indicates uridine, 5-methyluridine, or 5-hydroxymethyluridine
  misc_difference 379: note = n indicates uridine, 5-methyluridine, or 5-hydroxymethyluridine
  misc_difference 391: note = n indicates uridine, 5-methyluridine, or 5-hydroxymethyluridine
  misc_difference 400: note = n indicates uridine, 5-methyluridine, or 5-hydroxymethyluridine
  misc_difference 409: note = n indicates uridine, 5-methyluridine, or 5-hydroxymethyluridine
  misc_difference 412: note = n indicates uridine, 5-methyluridine, or 5-hydroxymethyluridine
  misc_difference 422: note = n indicates uridine, 5-methyluridine, or 5-hydroxymethyluridine
  misc_difference 427: note = n indicates uridine, 5-methyluridine, or 5-hydroxymethyluridine
  misc_difference 434: note = n indicates uridine, 5-methyluridine, or 5-hydroxymethyluridine
  misc_difference 440: note = n indicates uridine, 5-methyluridine, or 5-hydroxymethyluridine
  misc_difference 442: note = n indicates uridine, 5-methyluridine, or 5-hydroxymethyluridine
  misc_difference 444: note = n indicates uridine, 5-methyluridine, or 5-hydroxymethyluridine
  misc_difference 448: note = n indicates uridine, 5-methyluridine, or 5-hydroxymethyluridine
  misc_difference 462: note = n indicates uridine, 5-methyluridine, or 5-hydroxymethyluridine
  misc_difference 465: note = n indicates uridine, 5-methyluridine, or 5-hydroxymethyluridine
  misc_difference 467: note = n indicates uridine, 5-methyluridine, or 5-hydroxymethyluridine
  misc_difference 471: note = n indicates uridine, 5-methyluridine, or 5-hydroxymethyluridine
  misc_difference 484: note = n indicates uridine, 5-methyluridine, or 5-hydroxymethyluridine
  misc_difference 488: note = n indicates uridine, 5-methyluridine, or 5-hydroxymethyluridine
  misc_difference 490: note = n indicates uridine, 5-methyluridine, or 5-hydroxymethyluridine
  misc_difference 491: note = n indicates uridine, 5-methyluridine, or 5-hydroxymethyluridine
  misc_difference 492: note = n indicates uridine, 5-methyluridine, or 5-hydroxymethyluridine
  misc_difference 500: note = n indicates uridine, 5-methyluridine, or 5-hydroxymethyluridine
  misc_difference 502: note = n indicates uridine, 5-methyluridine, or 5-hydroxymethyluridine
  misc_difference 504: note = n indicates uridine, 5-methyluridine, or 5-hydroxymethyluridine
  misc_difference 511: note = n indicates uridine, 5-methyluridine, or 5-hydroxymethyluridine
  misc_difference 512: note = n indicates uridine, 5-methyluridine, or 5-hydroxymethyluridine
  misc_difference 527: note = n indicates uridine, 5-methyluridine, or 5-hydroxymethyluridine
  misc_difference 529: note = n indicates uridine, 5-methyluridine, or 5-hydroxymethyluridine
  misc_difference 531: note = n indicates uridine, 5-methyluridine, or 5-hydroxymethyluridine
  misc_difference 533: note = n indicates uridine, 5-methyluridine, or 5-hydroxymethyluridine
  misc_difference 545: note = n indicates uridine, 5-methyluridine, or 5-hydroxymethyluridine
  misc_difference 553: note = n indicates uridine, 5-methyluridine, or 5-hydroxymethyluridine
  misc_difference 554: note = n indicates uridine, 5-methyluridine, or 5-hydroxymethyluridine
  misc_difference 559: note = n indicates uridine, 5-methyluridine, or 5-hydroxymethyluridine
  misc_difference 564: note = n indicates uridine, 5-methyluridine, or 5-hydroxymethyluridine
  misc_difference 567: note = n indicates uridine, 5-methyluridine, or 5-hydroxymethyluridine
  misc_difference 571: note = n indicates uridine, 5-methyluridine, or 5-hydroxymethyluridine
  misc_difference 576: note = n indicates uridine, 5-methyluridine, or 5-hydroxymethyluridine
  misc_difference 577: note = n indicates uridine, 5-methyluridine, or 5-hydroxymethyluridine
  misc_difference 578: note = n indicates uridine, 5-methyluridine, or 5-hydroxymethyluridine
  misc_difference 590: note = n indicates uridine, 5-methyluridine, or 5-hydroxymethyluridine
  misc_difference 591: note = n indicates uridine, 5-methyluridine, or 5-hydroxymethyluridine
  misc_difference 592: note = n indicates uridine, 5-methyluridine, or 5-hydroxymethyluridine
  misc_difference 593: note = n indicates uridine, 5-methyluridine, or 5-hydroxymethyluridine
  misc_difference 595: note = n indicates uridine, 5-methyluridine, or 5-hydroxymethyluridine
  misc_difference 597: note = n indicates uridine, 5-methyluridine, or 5-hydroxymethyluridine
  misc_difference 598: note = n indicates uridine, 5-methyluridine, or 5-hydroxymethyluridine
  misc_difference 599: note = n indicates uridine, 5-methyluridine, or 5-hydroxymethyluridine
  misc_difference 606: note = n indicates uridine, 5-methyluridine, or 5-hydroxymethyluridine
  misc_difference 607: note = n indicates uridine, 5-methyluridine, or 5-hydroxymethyluridine
  misc_difference 611: note = n indicates uridine, 5-methyluridine, or 5-hydroxymethyluridine
  misc_difference 618: note = n indicates uridine, 5-methyluridine, or 5-hydroxymethyluridine
  misc_difference 620: note = n indicates uridine, 5-methyluridine, or 5-hydroxymethyluridine
  misc_difference 624: note = n indicates uridine, 5-methyluridine, or 5-hydroxymethyluridine
  misc_difference 627: note = n indicates uridine, 5-methyluridine, or 5-hydroxymethyluridine
  misc_difference 630: note = n indicates uridine, 5-methyluridine, or 5-hydroxymethyluridine
  misc_difference 632: note = n indicates uridine, 5-methyluridine, or 5-hydroxymethyluridine
  misc_difference 639: note = n indicates uridine, 5-methyluridine, or 5-hydroxymethyluridine
  misc_difference 655: note = n indicates uridine, 5-methyluridine, or 5-hydroxymethyluridine
  misc_difference 657: note = n indicates uridine, 5-methyluridine, or 5-hydroxymethyluridine
  misc_difference 658: note = n indicates uridine, 5-methyluridine, or 5-hydroxymethyluridine
  misc_difference 665: note = n indicates uridine, 5-methyluridine, or 5-hydroxymethyluridine
  misc_difference 668: note = n indicates uridine, 5-methyluridine, or 5-hydroxymethyluridine
  misc_difference 673: note = n indicates uridine, 5-methyluridine, or 5-hydroxymethyluridine
  misc_difference 679: note = n indicates uridine, 5-methyluridine, or 5-hydroxymethyluridine
  misc_difference 681: note = n indicates uridine, 5-methyluridine, or 5-hydroxymethyluridine
  misc_difference 687: note = n indicates uridine, 5-methyluridine, or 5-hydroxymethyluridine
  misc_difference 689: note = n indicates uridine, 5-methyluridine, or 5-hydroxymethyluridine
  misc_difference 694: note = n indicates uridine, 5-methyluridine, or 5-hydroxymethyluridine
  misc_difference 695: note = n indicates uridine, 5-methyluridine, or 5-hydroxymethyluridine
  misc_difference 697: note = n indicates uridine, 5-methyluridine, or 5-hydroxymethyluridine
  misc_difference 705: note = n indicates uridine, 5-methyluridine, or 5-hydroxymethyluridine
  misc_difference 710: note = n indicates uridine, 5-methyluridine, or 5-hydroxymethyluridine
  misc_difference 718: note = n indicates uridine, 5-methyluridine, or 5-hydroxymethyluridine
  misc_difference 720: note = n indicates uridine, 5-methyluridine, or 5-hydroxymethyluridine
  misc_difference 724: note = n indicates uridine, 5-methyluridine, or 5-hydroxymethyluridine
  misc_difference 725: note = n indicates uridine, 5-methyluridine, or 5-hydroxymethyluridine
  misc_difference 727: note = n indicates uridine, 5-methyluridine, or 5-hydroxymethyluridine
  misc_difference 728: note = n indicates uridine, 5-methyluridine, or 5-hydroxymethyluridine
  misc_difference 738: note = n indicates uridine, 5-methyluridine, or 5-hydroxymethyluridine
  misc_difference 740: note = n indicates uridine, 5-methyluridine, or 5-hydroxymethyluridine
  misc_difference 741: note = n indicates uridine, 5-methyluridine, or 5-hydroxymethyluridine
  misc_difference 742: note = n indicates uridine, 5-methyluridine, or 5-hydroxymethyluridine
  misc_difference 750: note = n indicates uridine, 5-methyluridine, or 5-hydroxymethyluridine
  misc_difference 758: note = n indicates uridine, 5-methyluridine, or 5-hydroxymethyluridine
  misc_difference 760: note = n indicates uridine, 5-methyluridine, or 5-hydroxymethyluridine
  misc_difference 761: note = n indicates uridine, 5-methyluridine, or 5-hydroxymethyluridine
  misc_difference 763: note = n indicates uridine, 5-methyluridine, or 5-hydroxymethyluridine
  misc_difference 765: note = n indicates uridine, 5-methyluridine, or 5-hydroxymethyluridine
  misc_difference 766: note = n indicates uridine, 5-methyluridine, or 5-hydroxymethyluridine
  misc_difference 768: note = n indicates uridine, 5-methyluridine, or 5-hydroxymethyluridine
  misc_difference 770: note = n indicates uridine, 5-methyluridine, or 5-hydroxymethyluridine
  misc_difference 772: note = n indicates uridine, 5-methyluridine, or 5-hydroxymethyluridine
  misc_difference 773: note = n indicates uridine, 5-methyluridine, or 5-hydroxymethyluridine
  misc_difference 777: note = n indicates uridine, 5-methyluridine, or 5-hydroxymethyluridine
  misc_difference 784: note = n indicates uridine, 5-methyluridine, or 5-hydroxymethyluridine
  misc_difference 786: note = n indicates uridine, 5-methyluridine, or 5-hydroxymethyluridine
  misc_difference 804: note = n indicates uridine, 5-methyluridine, or 5-hydroxymethyluridine
  misc_difference 805: note = n indicates uridine, 5-methyluridine, or 5-hydroxymethyluridine
  misc_difference 808: note = n indicates uridine, 5-methyluridine, or 5-hydroxymethyluridine
  misc_difference 816: note = n indicates uridine, 5-methyluridine, or 5-hydroxymethyluridine
  misc_difference 823: note = n indicates uridine, 5-methyluridine, or 5-hydroxymethyluridine
  misc_difference 828: note = n indicates uridine, 5-methyluridine, or 5-hydroxymethyluridine
  misc_difference 830: note = n indicates uridine, 5-methyluridine, or 5-hydroxymethyluridine
  misc_difference 832: note = n indicates uridine, 5-methyluridine, or 5-hydroxymethyluridine
  misc_difference 834: note = n indicates uridine, 5-methyluridine, or 5-hydroxymethyluridine
  misc_difference 835: note = n indicates uridine, 5-methyluridine, or 5-hydroxymethyluridine
  misc_difference 836: note = n indicates uridine, 5-methyluridine, or 5-hydroxymethyluridine
  misc_difference 840: note = n indicates uridine, 5-methyluridine, or 5-hydroxymethyluridine
  misc_difference 841: note = n indicates uridine, 5-methyluridine, or 5-hydroxymethyluridine
  misc_difference 845: note = n indicates uridine, 5-methyluridine, or 5-hydroxymethyluridine
  misc_difference 857: note = n indicates uridine, 5-methyluridine, or 5-hydroxymethyluridine
  misc_difference 858: note = n indicates uridine, 5-methyluridine, or 5-hydroxymethyluridine
  misc_difference 864: note = n indicates uridine, 5-methyluridine, or 5-hydroxymethyluridine
  misc_difference 866: note = n indicates uridine, 5-methyluridine, or 5-hydroxymethyluridine
  misc_difference 870: note = n indicates uridine, 5-methyluridine, or 5-hydroxymethyluridine
  misc_difference 872: note = n indicates uridine, 5-methyluridine, or 5-hydroxymethyluridine
  misc_difference 878: note = n indicates uridine, 5-methyluridine, or 5-hydroxymethyluridine
  misc_difference 880: note = n indicates uridine, 5-methyluridine, or 5-hydroxymethyluridine
  misc_difference 883: note = n indicates uridine, 5-methyluridine, or 5-hydroxymethyluridine
  misc_difference 884: note = n indicates uridine, 5-methyluridine, or 5-hydroxymethyluridine
  misc_difference 887: note = n indicates uridine, 5-methyluridine, or 5-hydroxymethyluridine
  misc_difference 888: note = n indicates uridine, 5-methyluridine, or 5-hydroxymethyluridine
  misc_difference 897: note = n indicates uridine, 5-methyluridine, or 5-hydroxymethyluridine
  misc_difference 901: note = n indicates uridine, 5-methyluridine, or 5-hydroxymethyluridine
  misc_difference 904: note = n indicates uridine, 5-methyluridine, or 5-hydroxymethyluridine
  misc_difference 905: note = n indicates uridine, 5-methyluridine, or 5-hydroxymethyluridine
  misc_difference 913: note = n indicates uridine, 5-methyluridine, or 5-hydroxymethyluridine
  misc_difference 917: note = n indicates uridine, 5-methyluridine, or 5-hydroxymethyluridine
  misc_difference 919: note = n indicates uridine, 5-methyluridine, or 5-hydroxymethyluridine
  misc_difference 923: note = n indicates uridine, 5-methyluridine, or 5-hydroxymethyluridine
  misc_difference 931: note = n indicates uridine, 5-methyluridine, or 5-hydroxymethyluridine
  misc_difference 933: note = n indicates uridine, 5-methyluridine, or 5-hydroxymethyluridine
  misc_difference 935: note = n indicates uridine, 5-methyluridine, or 5-hydroxymethyluridine
  misc_difference 944: note = n indicates uridine, 5-methyluridine, or 5-hydroxymethyluridine
  misc_difference 945: note = n indicates uridine, 5-methyluridine, or 5-hydroxymethyluridine
  misc_difference 951: note = n indicates uridine, 5-methyluridine, or 5-hydroxymethyluridine
  misc_difference 953: note = n indicates uridine, 5-methyluridine, or 5-hydroxymethyluridine
  misc_difference 956: note = n indicates uridine, 5-methyluridine, or 5-hydroxymethyluridine
  misc_difference 959: note = n indicates uridine, 5-methyluridine, or 5-hydroxymethyluridine
  misc_difference 964: note = n indicates uridine, 5-methyluridine, or 5-hydroxymethyluridine
  misc_difference 978: note = n indicates uridine, 5-methyluridine, or 5-hydroxymethyluridine
  misc_difference 979: note = n indicates uridine, 5-methyluridine, or 5-hydroxymethyluridine
  misc_difference 981: note = n indicates uridine, 5-methyluridine, or 5-hydroxymethyluridine
  misc_difference 982: note = n indicates uridine, 5-methyluridine, or 5-hydroxymethyluridine
  misc_difference 984: note = n indicates uridine, 5-methyluridine, or 5-hydroxymethyluridine
  misc_difference 987: note = n indicates uridine, 5-methyluridine, or 5-hydroxymethyluridine
  misc_difference 994: note = n indicates uridine, 5-methyluridine, or 5-hydroxymethyluridine
  misc_difference 1005: note = n indicates uridine, 5-methyluridine, or 5-hydroxymethyluridine
  misc_difference 1006: note = n indicates uridine, 5-methyluridine, or 5-hydroxymethyluridine
  misc_difference 1021: note = n indicates uridine, 5-methyluridine, or 5-hydroxymethyluridine
  misc_difference 1023: note = n indicates uridine, 5-methyluridine, or 5-hydroxymethyluridine
  misc_difference 1025: note = n indicates uridine, 5-methyluridine, or 5-hydroxymethyluridine
  misc_difference 1026: note = n indicates uridine, 5-methyluridine, or 5-hydroxymethyluridine
  misc_difference 1027: note = n indicates uridine, 5-methyluridine, or 5-hydroxymethyluridine
  misc_difference 1028: note = n indicates uridine, 5-methyluridine, or 5-hydroxymethyluridine
  misc_difference 1033: note = n indicates uridine, 5-methyluridine, or 5-hydroxymethyluridine
  misc_difference 1035: note = n indicates uridine, 5-methyluridine, or 5-hydroxymethyluridine
  misc_difference 1041: note = n indicates uridine, 5-methyluridine, or 5-hydroxymethyluridine
  misc_difference 1043: note = n indicates uridine, 5-methyluridine, or 5-hydroxymethyluridine
  misc_difference 1045: note = n indicates uridine, 5-methyluridine, or 5-hydroxymethyluridine
  misc_difference 1052: note = n indicates uridine, 5-methyluridine, or 5-hydroxymethyluridine
  misc_difference 1056: note = n indicates uridine, 5-methyluridine, or 5-hydroxymethyluridine
  misc_difference 1057: note = n indicates uridine, 5-methyluridine, or 5-hydroxymethyluridine
  misc_difference 1059: note = n indicates uridine, 5-methyluridine, or 5-hydroxymethyluridine
  misc_difference 1061: note = n indicates uridine, 5-methyluridine, or 5-hydroxymethyluridine
  misc_difference 1069: note = n indicates uridine, 5-methyluridine, or 5-hydroxymethyluridine
  misc_difference 1073: note = n indicates uridine, 5-methyluridine, or 5-hydroxymethyluridine
  misc_difference 1078: note = n indicates uridine, 5-methyluridine, or 5-hydroxymethyluridine
  misc_difference 1081: note = n indicates uridine, 5-methyluridine, or 5-hydroxymethyluridine
  misc_difference 1091: note = n indicates uridine, 5-methyluridine, or 5-hydroxymethyluridine
  misc_difference 1093: note = n indicates uridine, 5-methyluridine, or 5-hydroxymethyluridine
  misc_difference 1097: note = n indicates uridine, 5-methyluridine, or 5-hydroxymethyluridine
  misc_difference 1117: note = n indicates uridine, 5-methyluridine, or 5-hydroxymethyluridine
  misc_difference 1120: note = n indicates uridine, 5-methyluridine, or 5-hydroxymethyluridine
  misc_difference 1123: note = n indicates uridine, 5-methyluridine, or 5-hydroxymethyluridine
  misc_difference 1124: note = n indicates uridine, 5-methyluridine, or 5-hydroxymethyluridine
  misc_difference 1129: note = n indicates uridine, 5-methyluridine, or 5-hydroxymethyluridine
  misc_difference 1139: note = n indicates uridine, 5-methyluridine, or 5-hydroxymethyluridine
  misc_difference 1141: note = n indicates uridine, 5-methyluridine, or 5-hydroxymethyluridine
  misc_difference 1144: note = n indicates uridine, 5-methyluridine, or 5-hydroxymethyluridine
  misc_difference 1147: note = n indicates uridine, 5-methyluridine, or 5-hydroxymethyluridine
  misc_difference 1154: note = n indicates uridine, 5-methyluridine, or 5-hydroxymethyluridine
  misc_difference 1175: note = n indicates uridine, 5-methyluridine, or 5-hydroxymethyluridine
  misc_difference 1180: note = n indicates uridine, 5-methyluridine, or 5-hydroxymethyluridine
  misc_difference 1187: note = n indicates uridine, 5-methyluridine, or 5-hydroxymethyluridine
  misc_difference 1188: note = n indicates uridine, 5-methyluridine, or 5-hydroxymethyluridine
  misc_difference 1192: note = n indicates uridine, 5-methyluridine, or 5-hydroxymethyluridine
  misc_difference 1193: note = n indicates uridine, 5-methyluridine, or 5-hydroxymethyluridine
  misc_difference 1194: note = n indicates uridine, 5-methyluridine, or 5-hydroxymethyluridine
  misc_difference 1195: note = n indicates uridine, 5-methyluridine, or 5-hydroxymethyluridine
  misc_difference 1201: note = n indicates uridine, 5-methyluridine, or 5-hydroxymethyluridine
  misc_difference 1204: note = n indicates uridine, 5-methyluridine, or 5-hydroxymethyluridine
  misc_difference 1215: note = n indicates uridine, 5-methyluridine, or 5-hydroxymethyluridine
  misc_difference 1216: note = n indicates uridine, 5-methyluridine, or 5-hydroxymethyluridine
  misc_difference 1217: note = n indicates uridine, 5-methyluridine, or 5-hydroxymethyluridine
  misc_difference 1220: note = n indicates uridine, 5-methyluridine, or 5-hydroxymethyluridine
  misc_difference 1224: note = n indicates uridine, 5-methyluridine, or 5-hydroxymethyluridine
  misc_difference 1236: note = n indicates uridine, 5-methyluridine, or 5-hydroxymethyluridine
  misc_difference 1238: note = n indicates uridine, 5-methyluridine, or 5-hydroxymethyluridine
  misc_difference 1247: note = n indicates uridine, 5-methyluridine, or 5-hydroxymethyluridine
  misc_difference 1256: note = n indicates uridine, 5-methyluridine, or 5-hydroxymethyluridine
  misc_difference 1267: note = n indicates uridine, 5-methyluridine, or 5-hydroxymethyluridine
  misc_difference 1273: note = n indicates uridine, 5-methyluridine, or 5-hydroxymethyluridine
  misc_difference 1280: note = n indicates uridine, 5-methyluridine, or 5-hydroxymethyluridine
  misc_difference 1287: note = n indicates uridine, 5-methyluridine, or 5-hydroxymethyluridine
  misc_difference 1288: note = n indicates uridine, 5-methyluridine, or 5-hydroxymethyluridine
  misc_difference 1291: note = n indicates uridine, 5-methyluridine, or 5-hydroxymethyluridine
  misc_difference 1294: note = n indicates uridine, 5-methyluridine, or 5-hydroxymethyluridine
  misc_difference 1299: note = n indicates uridine, 5-methyluridine, or 5-hydroxymethyluridine
  misc_difference 1301: note = n indicates uridine, 5-methyluridine, or 5-hydroxymethyluridine
  misc_difference 1302: note = n indicates uridine, 5-methyluridine, or 5-hydroxymethyluridine
  misc_difference 1304: note = n indicates uridine, 5-methyluridine, or 5-hydroxymethyluridine
  misc_difference 1305: note = n indicates uridine, 5-methyluridine, or 5-hydroxymethyluridine
  misc_difference 1310: note = n indicates uridine, 5-methyluridine, or 5-hydroxymethyluridine
  misc_difference 1311: note = n indicates uridine, 5-methyluridine, or 5-hydroxymethyluridine
  misc_difference 1312: note = n indicates uridine, 5-methyluridine, or 5-hydroxymethyluridine
  misc_difference 1313: note = n indicates uridine, 5-methyluridine, or 5-hydroxymethyluridine
  misc_difference 1327: note = n indicates uridine, 5-methyluridine, or 5-hydroxymethyluridine
  misc_difference 1332: note = n indicates uridine, 5-methyluridine, or 5-hydroxymethyluridine
  misc_difference 1334: note = n indicates uridine, 5-methyluridine, or 5-hydroxymethyluridine
  misc_difference 1336: note = n indicates uridine, 5-methyluridine, or 5-hydroxymethyluridine
  misc_difference 1337: note = n indicates uridine, 5-methyluridine, or 5-hydroxymethyluridine
  misc_difference 1338: note = n indicates uridine, 5-methyluridine, or 5-hydroxymethyluridine
  misc_difference 1340: note = n indicates uridine, 5-methyluridine, or 5-hydroxymethyluridine
  misc_difference 1352: note = n indicates uridine, 5-methyluridine, or 5-hydroxymethyluridine
  misc_difference 1363: note = n indicates uridine, 5-methyluridine, or 5-hydroxymethyluridine
  misc_difference 1366: note = n indicates uridine, 5-methyluridine, or 5-hydroxymethyluridine
  misc_difference 1372: note = n indicates uridine, 5-methyluridine, or 5-hydroxymethyluridine
  misc_difference 1382: note = n indicates uridine, 5-methyluridine, or 5-hydroxymethyluridine
  misc_difference 1383: note = n indicates uridine, 5-methyluridine, or 5-hydroxymethyluridine
  misc_difference 1384: note = n indicates uridine, 5-methyluridine, or 5-hydroxymethyluridine
  misc_difference 1389: note = n indicates uridine, 5-methyluridine, or 5-hydroxymethyluridine
  misc_difference 1392: note = n indicates uridine, 5-methyluridine, or 5-hydroxymethyluridine
  misc_difference 1393: note = n indicates uridine, 5-methyluridine, or 5-hydroxymethyluridine
  misc_difference 1396: note = n indicates uridine, 5-methyluridine, or 5-hydroxymethyluridine
  misc_difference 1399: note = n indicates uridine, 5-methyluridine, or 5-hydroxymethyluridine
  misc_difference 1408: note = n indicates uridine, 5-methyluridine, or 5-hydroxymethyluridine
  misc_difference 1415: note = n indicates uridine, 5-methyluridine, or 5-hydroxymethyluridine
  misc_difference 1422: note = n indicates uridine, 5-methyluridine, or 5-hydroxymethyluridine
  misc_difference 1423: note = n indicates uridine, 5-methyluridine, or 5-hydroxymethyluridine
  misc_difference 1429: note = n indicates uridine, 5-methyluridine, or 5-hydroxymethyluridine
  misc_difference 1435: note = n indicates uridine, 5-methyluridine, or 5-hydroxymethyluridine
  misc_difference 1447: note = n indicates uridine, 5-methyluridine, or 5-hydroxymethyluridine
  misc_difference 1456: note = n indicates uridine, 5-methyluridine, or 5-hydroxymethyluridine
  misc_difference 1458: note = n indicates uridine, 5-methyluridine, or 5-hydroxymethyluridine
  misc_difference 1459: note = n indicates uridine, 5-methyluridine, or 5-hydroxymethyluridine
  misc_difference 1479: note = n indicates uridine, 5-methyluridine, or 5-hydroxymethyluridine
  misc_difference 1484: note = n indicates uridine, 5-methyluridine, or 5-hydroxymethyluridine
  misc_difference 1486: note = n indicates uridine, 5-methyluridine, or 5-hydroxymethyluridine
  misc_difference 1489: note = n indicates uridine, 5-methyluridine, or 5-hydroxymethyluridine
  misc_difference 1490: note = n indicates uridine, 5-methyluridine, or 5-hydroxymethyluridine
  misc_difference 1504: note = n indicates uridine, 5-methyluridine, or 5-hydroxymethyluridine
  misc_difference 1514: note = n indicates uridine, 5-methyluridine, or 5-hydroxymethyluridine
  misc_difference 1518: note = n indicates uridine, 5-methyluridine, or 5-hydroxymethyluridine
  misc_difference 1529: note = n indicates uridine, 5-methyluridine, or 5-hydroxymethyluridine
  misc_difference 1535: note = n indicates uridine, 5-methyluridine, or 5-hydroxymethyluridine
  misc_difference 1543: note = n indicates uridine, 5-methyluridine, or 5-hydroxymethyluridine
  misc_difference 1547: note = n indicates uridine, 5-methyluridine, or 5-hydroxymethyluridine
  misc_difference 1560: note = n indicates uridine, 5-methyluridine, or 5-hydroxymethyluridine
  misc_difference 1561: note = n indicates uridine, 5-methyluridine, or 5-hydroxymethyluridine
  misc_difference 1571: note = n indicates uridine, 5-methyluridine, or 5-hydroxymethyluridine
  misc_difference 1573: note = n indicates uridine, 5-methyluridine, or 5-hydroxymethyluridine
  misc_difference 1580: note = n indicates uridine, 5-methyluridine, or 5-hydroxymethyluridine
  misc_difference 1581: note = n indicates uridine, 5-methyluridine, or 5-hydroxymethyluridine
  misc_difference 1582: note = n indicates uridine, 5-methyluridine, or 5-hydroxymethyluridine
  misc_difference 1589: note = n indicates uridine, 5-methyluridine, or 5-hydroxymethyluridine
  misc_difference 1592: note = n indicates uridine, 5-methyluridine, or 5-hydroxymethyluridine
  misc_difference 1594: note = n indicates uridine, 5-methyluridine, or 5-hydroxymethyluridine
  misc_difference 1595: note = n indicates uridine, 5-methyluridine, or 5-hydroxymethyluridine
  misc_difference 1607: note = n indicates uridine, 5-methyluridine, or 5-hydroxymethyluridine
  misc_difference 1609: note = n indicates uridine, 5-methyluridine, or 5-hydroxymethyluridine
  misc_difference 1621: note = n indicates uridine, 5-methyluridine, or 5-hydroxymethyluridine
  misc_difference 1626: note = n indicates uridine, 5-methyluridine, or 5-hydroxymethyluridine
  misc_difference 1627: note = n indicates uridine, 5-methyluridine, or 5-hydroxymethyluridine
  misc_difference 1630: note = n indicates uridine, 5-methyluridine, or 5-hydroxymethyluridine
  misc_difference 1632: note = n indicates uridine, 5-methyluridine, or 5-hydroxymethyluridine
  misc_difference 1633: note = n indicates uridine, 5-methyluridine, or 5-hydroxymethyluridine
  misc_difference 1643: note = n indicates uridine, 5-methyluridine, or 5-hydroxymethyluridine
  misc_difference 1653: note = n indicates uridine, 5-methyluridine, or 5-hydroxymethyluridine
  misc_difference 1657: note = n indicates uridine, 5-methyluridine, or 5-hydroxymethyluridine
  misc_difference 1667: note = n indicates uridine, 5-methyluridine, or 5-hydroxymethyluridine
  misc_difference 1670: note = n indicates uridine, 5-methyluridine, or 5-hydroxymethyluridine
  misc_difference 1674: note = n indicates uridine, 5-methyluridine, or 5-hydroxymethyluridine
  misc_difference 1675: note = n indicates uridine, 5-methyluridine, or 5-hydroxymethyluridine
  misc_difference 1678: note = n indicates uridine, 5-methyluridine, or 5-hydroxymethyluridine
  misc_difference 1684: note = n indicates uridine, 5-methyluridine, or 5-hydroxymethyluridine
  misc_difference 1685: note = n indicates uridine, 5-methyluridine, or 5-hydroxymethyluridine
  misc_difference 1692: note = n indicates uridine, 5-methyluridine, or 5-hydroxymethyluridine
  misc_difference 1697: note = n indicates uridine, 5-methyluridine, or 5-hydroxymethyluridine
  misc_difference 1711: note = n indicates uridine, 5-methyluridine, or 5-hydroxymethyluridine
  misc_difference 1716: note = n indicates uridine, 5-methyluridine, or 5-hydroxymethyluridine
  misc_difference 1718: note = n indicates uridine, 5-methyluridine, or 5-hydroxymethyluridine
  misc_difference 1719: note = n indicates uridine, 5-methyluridine, or 5-hydroxymethyluridine
  misc_difference 1724: note = n indicates uridine, 5-methyluridine, or 5-hydroxymethyluridine
  misc_difference 1726: note = n indicates uridine, 5-methyluridine, or 5-hydroxymethyluridine
  misc_difference 1729: note = n indicates uridine, 5-methyluridine, or 5-hydroxymethyluridine
  misc_difference 1730: note = n indicates uridine, 5-methyluridine, or 5-hydroxymethyluridine
  misc_difference 1731: note = n indicates uridine, 5-methyluridine, or 5-hydroxymethyluridine
  misc_difference 1733: note = n indicates uridine, 5-methyluridine, or 5-hydroxymethyluridine
  misc_difference 1742: note = n indicates uridine, 5-methyluridine, or 5-hydroxymethyluridine
  misc_difference 1744: note = n indicates uridine, 5-methyluridine, or 5-hydroxymethyluridine
  misc_difference 1747: note = n indicates uridine, 5-methyluridine, or 5-hydroxymethyluridine
  misc_difference 1754: note = n indicates uridine, 5-methyluridine, or 5-hydroxymethyluridine
  misc_difference 1761: note = n indicates uridine, 5-methyluridine, or 5-hydroxymethyluridine
  misc_difference 1762: note = n indicates uridine, 5-methyluridine, or 5-hydroxymethyluridine
  misc_difference 1764: note = n indicates uridine, 5-methyluridine, or 5-hydroxymethyluridine
  misc_difference 1766: note = n indicates uridine, 5-methyluridine, or 5-hydroxymethyluridine
  misc_difference 1767: note = n indicates uridine, 5-methyluridine, or 5-hydroxymethyluridine
  misc_difference 1771: note = n indicates uridine, 5-methyluridine, or 5-hydroxymethyluridine
  misc_difference 1778: note = n indicates uridine, 5-methyluridine, or 5-hydroxymethyluridine
  misc_difference 1780: note = n indicates uridine, 5-methyluridine, or 5-hydroxymethyluridine
  misc_difference 1784: note = n indicates uridine, 5-methyluridine, or 5-hydroxymethyluridine
  misc_difference 1792: note = n indicates uridine, 5-methyluridine, or 5-hydroxymethyluridine
  misc_difference 1795: note = n indicates uridine, 5-methyluridine, or 5-hydroxymethyluridine
  misc_difference 1798: note = n indicates uridine, 5-methyluridine, or 5-hydroxymethyluridine
  misc_difference 1801: note = n indicates uridine, 5-methyluridine, or 5-hydroxymethyluridine
  misc_difference 1809: note = n indicates uridine, 5-methyluridine, or 5-hydroxymethyluridine
  misc_difference 1811: note = n indicates uridine, 5-methyluridine, or 5-hydroxymethyluridine
  misc_difference 1826: note = n indicates uridine, 5-methyluridine, or 5-hydroxymethyluridine
  misc_difference 1827: note = n indicates uridine, 5-methyluridine, or 5-hydroxymethyluridine
  misc_difference 1829: note = n indicates uridine, 5-methyluridine, or 5-hydroxymethyluridine
  misc_difference 1834: note = n indicates uridine, 5-methyluridine, or 5-hydroxymethyluridine
  misc_difference 1842: note = n indicates uridine, 5-methyluridine, or 5-hydroxymethyluridine
  misc_difference 1847: note = n indicates uridine, 5-methyluridine, or 5-hydroxymethyluridine
  misc_difference 1850: note = n indicates uridine, 5-methyluridine, or 5-hydroxymethyluridine
  misc_difference 1855: note = n indicates uridine, 5-methyluridine, or 5-hydroxymethyluridine
  misc_difference 1858: note = n indicates uridine, 5-methyluridine, or 5-hydroxymethyluridine
  misc_difference 1861: note = n indicates uridine, 5-methyluridine, or 5-hydroxymethyluridine
  misc_difference 1874: note = n indicates uridine, 5-methyluridine, or 5-hydroxymethyluridine
  misc_difference 1879: note = n indicates uridine, 5-methyluridine, or 5-hydroxymethyluridine
  misc_difference 1885: note = n indicates uridine, 5-methyluridine, or 5-hydroxymethyluridine
  misc_difference 1893: note = n indicates uridine, 5-methyluridine, or 5-hydroxymethyluridine
  misc_difference 1894: note = n indicates uridine, 5-methyluridine, or 5-hydroxymethyluridine
  misc_difference 1895: note = n indicates uridine, 5-methyluridine, or 5-hydroxymethyluridine
  misc_difference 1901: note = n indicates uridine, 5-methyluridine, or 5-hydroxymethyluridine
  misc_difference 1903: note = n indicates uridine, 5-methyluridine, or 5-hydroxymethyluridine
  misc_difference 1907: note = n indicates uridine, 5-methyluridine, or 5-hydroxymethyluridine
  misc_difference 1913: note = n indicates uridine, 5-methyluridine, or 5-hydroxymethyluridine
  misc_difference 1921: note = n indicates uridine, 5-methyluridine, or 5-hydroxymethyluridine
  misc_difference 1922: note = n indicates uridine, 5-methyluridine, or 5-hydroxymethyluridine
  misc_difference 1924: note = n indicates uridine, 5-methyluridine, or 5-hydroxymethyluridine
  misc_difference 1926: note = n indicates uridine, 5-methyluridine, or 5-hydroxymethyluridine
  misc_difference 1937: note = n indicates uridine, 5-methyluridine, or 5-hydroxymethyluridine
  misc_difference 1941: note = n indicates uridine, 5-methyluridine, or 5-hydroxymethyluridine
  misc_difference 1942: note = n indicates uridine, 5-methyluridine, or 5-hydroxymethyluridine
  misc_difference 1945: note = n indicates uridine, 5-methyluridine, or 5-hydroxymethyluridine
  misc_difference 1953: note = n indicates uridine, 5-methyluridine, or 5-hydroxymethyluridine
  misc_difference 1957: note = n indicates uridine, 5-methyluridine, or 5-hydroxymethyluridine
  misc_difference 1964: note = n indicates uridine, 5-methyluridine, or 5-hydroxymethyluridine
  misc_difference 1966: note = n indicates uridine, 5-methyluridine, or 5-hydroxymethyluridine
  misc_difference 1967: note = n indicates uridine, 5-methyluridine, or 5-hydroxymethyluridine
  misc_difference 1976: note = n indicates uridine, 5-methyluridine, or 5-hydroxymethyluridine
  misc_difference 1987: note = n indicates uridine, 5-methyluridine, or 5-hydroxymethyluridine
  misc_difference 1994: note = n indicates uridine, 5-methyluridine, or 5-hydroxymethyluridine
  misc_difference 1997: note = n indicates uridine, 5-methyluridine, or 5-hydroxymethyluridine
  misc_difference 2004: note = n indicates uridine, 5-methyluridine, or 5-hydroxymethyluridine
  misc_difference 2006: note = n indicates uridine, 5-methyluridine, or 5-hydroxymethyluridine
  misc_difference 2007: note = n indicates uridine, 5-methyluridine, or 5-hydroxymethyluridine
  misc_difference 2015: note = n indicates uridine, 5-methyluridine, or 5-hydroxymethyluridine
  misc_difference 2017: note = n indicates uridine, 5-methyluridine, or 5-hydroxymethyluridine
  misc_difference 2043: note = n indicates uridine, 5-methyluridine, or 5-hydroxymethyluridine
  misc_difference 2047: note = n indicates uridine, 5-methyluridine, or 5-hydroxymethyluridine
  misc_difference 2049: note = n indicates uridine, 5-methyluridine, or 5-hydroxymethyluridine
  misc_difference 2056: note = n indicates uridine, 5-methyluridine, or 5-hydroxymethyluridine
  misc_difference 2070: note = n indicates uridine, 5-methyluridine, or 5-hydroxymethyluridine
  misc_difference 2074: note = n indicates uridine, 5-methyluridine, or 5-hydroxymethyluridine
  misc_difference 2086: note = n indicates uridine, 5-methyluridine, or 5-hydroxymethyluridine
  misc_difference 2089: note = n indicates uridine, 5-methyluridine, or 5-hydroxymethyluridine
  misc_difference 2093: note = n indicates uridine, 5-methyluridine, or 5-hydroxymethyluridine
  misc_difference 2098: note = n indicates uridine, 5-methyluridine, or 5-hydroxymethyluridine
  misc_difference 2104: note = n indicates uridine, 5-methyluridine, or 5-hydroxymethyluridine
  misc_difference 2116: note = n indicates uridine, 5-methyluridine, or 5-hydroxymethyluridine
  misc_difference 2119: note = n indicates uridine, 5-methyluridine, or 5-hydroxymethyluridine
  misc_difference 2123: note = n indicates uridine, 5-methyluridine, or 5-hydroxymethyluridine
  misc_difference 2126: note = n indicates uridine, 5-methyluridine, or 5-hydroxymethyluridine
  misc_difference 2130: note = n indicates uridine, 5-methyluridine, or 5-hydroxymethyluridine
  misc_difference 2131: note = n indicates uridine, 5-methyluridine, or 5-hydroxymethyluridine
  misc_difference 2135: note = n indicates uridine, 5-methyluridine, or 5-hydroxymethyluridine
  misc_difference 2139: note = n indicates uridine, 5-methyluridine, or 5-hydroxymethyluridine
  misc_difference 2140: note = n indicates uridine, 5-methyluridine, or 5-hydroxymethyluridine
  misc_difference 2145: note = n indicates uridine, 5-methyluridine, or 5-hydroxymethyluridine
  misc_difference 2153: note = n indicates uridine, 5-methyluridine, or 5-hydroxymethyluridine
  misc_difference 2155: note = n indicates uridine, 5-methyluridine, or 5-hydroxymethyluridine
  misc_difference 2174: note = n indicates uridine, 5-methyluridine, or 5-hydroxymethyluridine
  misc_difference 2177: note = n indicates uridine, 5-methyluridine, or 5-hydroxymethyluridine
  misc_difference 2178: note = n indicates uridine, 5-methyluridine, or 5-hydroxymethyluridine
  misc_difference 2185: note = n indicates uridine, 5-methyluridine, or 5-hydroxymethyluridine
  misc_difference 2194: note = n indicates uridine, 5-methyluridine, or 5-hydroxymethyluridine
  misc_difference 2200: note = n indicates uridine, 5-methyluridine, or 5-hydroxymethyluridine
  misc_difference 2202: note = n indicates uridine, 5-methyluridine, or 5-hydroxymethyluridine
  misc_difference 2204: note = n indicates uridine, 5-methyluridine, or 5-hydroxymethyluridine
  misc_difference 2209: note = n indicates uridine, 5-methyluridine, or 5-hydroxymethyluridine
  misc_difference 2217: note = n indicates uridine, 5-methyluridine, or 5-hydroxymethyluridine
  misc_difference 2226: note = n indicates uridine, 5-methyluridine, or 5-hydroxymethyluridine
  misc_difference 2228: note = n indicates uridine, 5-methyluridine, or 5-hydroxymethyluridine
  misc_difference 2233: note = n indicates uridine, 5-methyluridine, or 5-hydroxymethyluridine
  misc_difference 2236: note = n indicates uridine, 5-methyluridine, or 5-hydroxymethyluridine
  misc_difference 2237: note = n indicates uridine, 5-methyluridine, or 5-hydroxymethyluridine
  misc_difference 2248: note = n indicates uridine, 5-methyluridine, or 5-hydroxymethyluridine
  misc_difference 2261: note = n indicates uridine, 5-methyluridine, or 5-hydroxymethyluridine
  misc_difference 2263: note = n indicates uridine, 5-methyluridine, or 5-hydroxymethyluridine
  misc_difference 2266: note = n indicates uridine, 5-methyluridine, or 5-hydroxymethyluridine
  misc_difference 2269: note = n indicates uridine, 5-methyluridine, or 5-hydroxymethyluridine
  misc_difference 2289: note = n indicates uridine, 5-methyluridine, or 5-hydroxymethyluridine
  misc_difference 2291: note = n indicates uridine, 5-methyluridine, or 5-hydroxymethyluridine
  misc_difference 2299: note = n indicates uridine, 5-methyluridine, or 5-hydroxymethyluridine
  misc_difference 2300: note = n indicates uridine, 5-methyluridine, or 5-hydroxymethyluridine
  misc_difference 2302: note = n indicates uridine, 5-methyluridine, or 5-hydroxymethyluridine
  misc_difference 2311: note = n indicates uridine, 5-methyluridine, or 5-hydroxymethyluridine
  misc_difference 2320: note = n indicates uridine, 5-methyluridine, or 5-hydroxymethyluridine
  misc_difference 2329: note = n indicates uridine, 5-methyluridine, or 5-hydroxymethyluridine
  misc_difference 2335: note = n indicates uridine, 5-methyluridine, or 5-hydroxymethyluridine
  misc_difference 2339: note = n indicates uridine, 5-methyluridine, or 5-hydroxymethyluridine
  misc_difference 2348: note = n indicates uridine, 5-methyluridine, or 5-hydroxymethyluridine
  misc_difference 2350: note = n indicates uridine, 5-methyluridine, or 5-hydroxymethyluridine
  misc_difference 2355: note = n indicates uridine, 5-methyluridine, or 5-hydroxymethyluridine
  misc_difference 2359: note = n indicates uridine, 5-methyluridine, or 5-hydroxymethyluridine
  misc_difference 2362: note = n indicates uridine, 5-methyluridine, or 5-hydroxymethyluridine
  misc_difference 2364: note = n indicates uridine, 5-methyluridine, or 5-hydroxymethyluridine
  misc_difference 2365: note = n indicates uridine, 5-methyluridine, or 5-hydroxymethyluridine
  misc_difference 2369: note = n indicates uridine, 5-methyluridine, or 5-hydroxymethyluridine
  misc_difference 2373: note = n indicates uridine, 5-methyluridine, or 5-hydroxymethyluridine
  misc_difference 2386: note = n indicates uridine, 5-methyluridine, or 5-hydroxymethyluridine
  misc_difference 2395: note = n indicates uridine, 5-methyluridine, or 5-hydroxymethyluridine
  misc_difference 2397: note = n indicates uridine, 5-methyluridine, or 5-hydroxymethyluridine
  misc_difference 2399: note = n indicates uridine, 5-methyluridine, or 5-hydroxymethyluridine
  misc_difference 2401: note = n indicates uridine, 5-methyluridine, or 5-hydroxymethyluridine
  misc_difference 2402: note = n indicates uridine, 5-methyluridine, or 5-hydroxymethyluridine
  misc_difference 2411: note = n indicates uridine, 5-methyluridine, or 5-hydroxymethyluridine
  misc_difference 2412: note = n indicates uridine, 5-methyluridine, or 5-hydroxymethyluridine
  misc_difference 2413: note = n indicates uridine, 5-methyluridine, or 5-hydroxymethyluridine
  misc_difference 2414: note = n indicates uridine, 5-methyluridine, or 5-hydroxymethyluridine
  misc_difference 2417: note = n indicates uridine, 5-methyluridine, or 5-hydroxymethyluridine
  misc_difference 2418: note = n indicates uridine, 5-methyluridine, or 5-hydroxymethyluridine
  misc_difference 2420: note = n indicates uridine, 5-methyluridine, or 5-hydroxymethyluridine
  misc_difference 2423: note = n indicates uridine, 5-methyluridine, or 5-hydroxymethyluridine
  misc_difference 2429: note = n indicates uridine, 5-methyluridine, or 5-hydroxymethyluridine
  misc_difference 2432: note = n indicates uridine, 5-methyluridine, or 5-hydroxymethyluridine
  misc_difference 2434: note = n indicates uridine, 5-methyluridine, or 5-hydroxymethyluridine
  misc_difference 2443: note = n indicates uridine, 5-methyluridine, or 5-hydroxymethyluridine
  misc_difference 2446: note = n indicates uridine, 5-methyluridine, or 5-hydroxymethyluridine
  misc_difference 2452: note = n indicates uridine, 5-methyluridine, or 5-hydroxymethyluridine
  misc_difference 2453: note = n indicates uridine, 5-methyluridine, or 5-hydroxymethyluridine
  misc_difference 2455: note = n indicates uridine, 5-methyluridine, or 5-hydroxymethyluridine
  misc_difference 2462: note = n indicates uridine, 5-methyluridine, or 5-hydroxymethyluridine
  misc_difference 2473: note = n indicates uridine, 5-methyluridine, or 5-hydroxymethyluridine
  misc_difference 2476: note = n indicates uridine, 5-methyluridine, or 5-hydroxymethyluridine
  misc_difference 2478: note = n indicates uridine, 5-methyluridine, or 5-hydroxymethyluridine
  misc_difference 2486: note = n indicates uridine, 5-methyluridine, or 5-hydroxymethyluridine
  misc_difference 2496: note = n indicates uridine, 5-methyluridine, or 5-hydroxymethyluridine
  misc_difference 2501: note = n indicates uridine, 5-methyluridine, or 5-hydroxymethyluridine
  misc_difference 2502: note = n indicates uridine, 5-methyluridine, or 5-hydroxymethyluridine
  misc_difference 2503: note = n indicates uridine, 5-methyluridine, or 5-hydroxymethyluridine
  misc_difference 2504: note = n indicates uridine, 5-methyluridine, or 5-hydroxymethyluridine
  misc_difference 2505: note = n indicates uridine, 5-methyluridine, or 5-hydroxymethyluridine
  misc_difference 2506: note = n indicates uridine, 5-methyluridine, or 5-hydroxymethyluridine
  misc_difference 2507: note = n indicates uridine, 5-methyluridine, or 5-hydroxymethyluridine
  misc_difference 2512: note = n indicates uridine, 5-methyluridine, or 5-hydroxymethyluridine
  misc_difference 2515: note = n indicates uridine, 5-methyluridine, or 5-hydroxymethyluridine
  misc_difference 2517: note = n indicates uridine, 5-methyluridine, or 5-hydroxymethyluridine
  misc_difference 2521: note = n indicates uridine, 5-methyluridine, or 5-hydroxymethyluridine
  misc_difference 2527: note = n indicates uridine, 5-methyluridine, or 5-hydroxymethyluridine
  misc_difference 2531: note = n indicates uridine, 5-methyluridine, or 5-hydroxymethyluridine
  misc_difference 2532: note = n indicates uridine, 5-methyluridine, or 5-hydroxymethyluridine
  misc_difference 2533: note = n indicates uridine, 5-methyluridine, or 5-hydroxymethyluridine
  misc_difference 2534: note = n indicates uridine, 5-methyluridine, or 5-hydroxymethyluridine
  misc_difference 2545: note = n indicates uridine, 5-methyluridine, or 5-hydroxymethyluridine
  misc_difference 2546: note = n indicates uridine, 5-methyluridine, or 5-hydroxymethyluridine
  misc_difference 2547: note = n indicates uridine, 5-methyluridine, or 5-hydroxymethyluridine
  misc_difference 2557: note = n indicates uridine, 5-methyluridine, or 5-hydroxymethyluridine
  misc_difference 2559: note = n indicates uridine, 5-methyluridine, or 5-hydroxymethyluridine
  misc_difference 2560: note = n indicates uridine, 5-methyluridine, or 5-hydroxymethyluridine
  misc_difference 2572: note = n indicates uridine, 5-methyluridine, or 5-hydroxymethyluridine
  misc_difference 2574: note = n indicates uridine, 5-methyluridine, or 5-hydroxymethyluridine
  misc_difference 2576: note = n indicates uridine, 5-methyluridine, or 5-hydroxymethyluridine
  misc_difference 2582: note = n indicates uridine, 5-methyluridine, or 5-hydroxymethyluridine
  misc_difference 2583: note = n indicates uridine, 5-methyluridine, or 5-hydroxymethyluridine
  misc_difference 2588: note = n indicates uridine, 5-methyluridine, or 5-hydroxymethyluridine
  misc_difference 2592: note = n indicates uridine, 5-methyluridine, or 5-hydroxymethyluridine
  misc_difference 2594: note = n indicates uridine, 5-methyluridine, or 5-hydroxymethyluridine
  misc_difference 2596: note = n indicates uridine, 5-methyluridine, or 5-hydroxymethyluridine
  misc_difference 2600: note = n indicates uridine, 5-methyluridine, or 5-hydroxymethyluridine
  misc_difference 2601: note = n indicates uridine, 5-methyluridine, or 5-hydroxymethyluridine
  misc_difference 2605: note = n indicates uridine, 5-methyluridine, or 5-hydroxymethyluridine
  misc_difference 2608: note = n indicates uridine, 5-methyluridine, or 5-hydroxymethyluridine
  misc_difference 2610: note = n indicates uridine, 5-methyluridine, or 5-hydroxymethyluridine
  misc_difference 2616: note = n indicates uridine, 5-methyluridine, or 5-hydroxymethyluridine
  misc_difference 2617: note = n indicates uridine, 5-methyluridine, or 5-hydroxymethyluridine
  misc_difference 2619: note = n indicates uridine, 5-methyluridine, or 5-hydroxymethyluridine
  misc_difference 2620: note = n indicates uridine, 5-methyluridine, or 5-hydroxymethyluridine
  misc_difference 2621: note = n indicates uridine, 5-methyluridine, or 5-hydroxymethyluridine
  misc_difference 2622: note = n indicates uridine, 5-methyluridine, or 5-hydroxymethyluridine
  misc_difference 2635: note = n indicates uridine, 5-methyluridine, or 5-hydroxymethyluridine
  misc_difference 2648: note = n indicates uridine, 5-methyluridine, or 5-hydroxymethyluridine
  misc_difference 2660: note = n indicates uridine, 5-methyluridine, or 5-hydroxymethyluridine
  misc_difference 2665: note = n indicates uridine, 5-methyluridine, or 5-hydroxymethyluridine
  misc_difference 2666: note = n indicates uridine, 5-methyluridine, or 5-hydroxymethyluridine
  misc_difference 2668: note = n indicates uridine, 5-methyluridine, or 5-hydroxymethyluridine
  misc_difference 2671: note = n indicates uridine, 5-methyluridine, or 5-hydroxymethyluridine
  misc_difference 2672: note = n indicates uridine, 5-methyluridine, or 5-hydroxymethyluridine
  misc_difference 2678: note = n indicates uridine, 5-methyluridine, or 5-hydroxymethyluridine
  misc_difference 2687: note = n indicates uridine, 5-methyluridine, or 5-hydroxymethyluridine
  misc_difference 2696: note = n indicates uridine, 5-methyluridine, or 5-hydroxymethyluridine
  misc_difference 2708: note = n indicates uridine, 5-methyluridine, or 5-hydroxymethyluridine
  misc_difference 2710: note = n indicates uridine, 5-methyluridine, or 5-hydroxymethyluridine
  misc_difference 2713: note = n indicates uridine, 5-methyluridine, or 5-hydroxymethyluridine
  misc_difference 2714: note = n indicates uridine, 5-methyluridine, or 5-hydroxymethyluridine
  misc_difference 2716: note = n indicates uridine, 5-methyluridine, or 5-hydroxymethyluridine
  misc_difference 2720: note = n indicates uridine, 5-methyluridine, or 5-hydroxymethyluridine
  misc_difference 2721: note = n indicates uridine, 5-methyluridine, or 5-hydroxymethyluridine
  misc_difference 2723: note = n indicates uridine, 5-methyluridine, or 5-hydroxymethyluridine
  misc_difference 2724: note = n indicates uridine, 5-methyluridine, or 5-hydroxymethyluridine
  misc_difference 2725: note = n indicates uridine, 5-methyluridine, or 5-hydroxymethyluridine
  misc_difference 2733: note = n indicates uridine, 5-methyluridine, or 5-hydroxymethyluridine
  misc_difference 2737: note = n indicates uridine, 5-methyluridine, or 5-hydroxymethyluridine
  misc_difference 2745: note = n indicates uridine, 5-methyluridine, or 5-hydroxymethyluridine
  misc_difference 2746: note = n indicates uridine, 5-methyluridine, or 5-hydroxymethyluridine
  misc_difference 2752: note = n indicates uridine, 5-methyluridine, or 5-hydroxymethyluridine
  misc_difference 2756: note = n indicates uridine, 5-methyluridine, or 5-hydroxymethyluridine
  misc_difference 2757: note = n indicates uridine, 5-methyluridine, or 5-hydroxymethyluridine
  misc_difference 2773: note = n indicates uridine, 5-methyluridine, or 5-hydroxymethyluridine
  misc_difference 2776: note = n indicates uridine, 5-methyluridine, or 5-hydroxymethyluridine
  misc_difference 2786: note = n indicates uridine, 5-methyluridine, or 5-hydroxymethyluridine
  misc_difference 2790: note = n indicates uridine, 5-methyluridine, or 5-hydroxymethyluridine
  misc_difference 2792: note = n indicates uridine, 5-methyluridine, or 5-hydroxymethyluridine
  misc_difference 2800: note = n indicates uridine, 5-methyluridine, or 5-hydroxymethyluridine
  misc_difference 2807: note = n indicates uridine, 5-methyluridine, or 5-hydroxymethyluridine
  misc_difference 2813: note = n indicates uridine, 5-methyluridine, or 5-hydroxymethyluridine
  misc_difference 2815: note = n indicates uridine, 5-methyluridine, or 5-hydroxymethyluridine
  misc_difference 2817: note = n indicates uridine, 5-methyluridine, or 5-hydroxymethyluridine
  misc_difference 2819: note = n indicates uridine, 5-methyluridine, or 5-hydroxymethyluridine
  misc_difference 2824: note = n indicates uridine, 5-methyluridine, or 5-hydroxymethyluridine
  misc_difference 2825: note = n indicates uridine, 5-methyluridine, or 5-hydroxymethyluridine
  misc_difference 2829: note = n indicates uridine, 5-methyluridine, or 5-hydroxymethyluridine
  misc_difference 2836: note = n indicates uridine, 5-methyluridine, or 5-hydroxymethyluridine
  misc_difference 2840: note = n indicates uridine, 5-methyluridine, or 5-hydroxymethyluridine
  misc_difference 2846: note = n indicates uridine, 5-methyluridine, or 5-hydroxymethyluridine
  misc_difference 2849: note = n indicates uridine, 5-methyluridine, or 5-hydroxymethyluridine
  misc_difference 2851: note = n indicates uridine, 5-methyluridine, or 5-hydroxymethyluridine
  misc_difference 2853: note = n indicates uridine, 5-methyluridine, or 5-hydroxymethyluridine
  misc_difference 2865: note = n indicates uridine, 5-methyluridine, or 5-hydroxymethyluridine
  misc_difference 2873: note = n indicates uridine, 5-methyluridine, or 5-hydroxymethyluridine
  misc_difference 2875: note = n indicates uridine, 5-methyluridine, or 5-hydroxymethyluridine
  misc_difference 2881: note = n indicates uridine, 5-methyluridine, or 5-hydroxymethyluridine
  misc_difference 2884: note = n indicates uridine, 5-methyluridine, or 5-hydroxymethyluridine
  misc_difference 2887: note = n indicates uridine, 5-methyluridine, or 5-hydroxymethyluridine
  misc_difference 2908: note = n indicates uridine, 5-methyluridine, or 5-hydroxymethyluridine
  misc_difference 2911: note = n indicates uridine, 5-methyluridine, or 5-hydroxymethyluridine
  misc_difference 2913: note = n indicates uridine, 5-methyluridine, or 5-hydroxymethyluridine
  misc_difference 2923: note = n indicates uridine, 5-methyluridine, or 5-hydroxymethyluridine
  misc_difference 2937: note = n indicates uridine, 5-methyluridine, or 5-hydroxymethyluridine
  misc_difference 2941: note = n indicates uridine, 5-methyluridine, or 5-hydroxymethyluridine
  misc_difference 2950: note = n indicates uridine, 5-methyluridine, or 5-hydroxymethyluridine
  misc_difference 2954: note = n indicates uridine, 5-methyluridine, or 5-hydroxymethyluridine
  misc_difference 2961: note = n indicates uridine, 5-methyluridine, or 5-hydroxymethyluridine
  misc_difference 2966: note = n indicates uridine, 5-methyluridine, or 5-hydroxymethyluridine
  misc_difference 2972: note = n indicates uridine, 5-methyluridine, or 5-hydroxymethyluridine
  misc_difference 2973: note = n indicates uridine, 5-methyluridine, or 5-hydroxymethyluridine
  misc_difference 2974: note = n indicates uridine, 5-methyluridine, or 5-hydroxymethyluridine
  misc_difference 2978: note = n indicates uridine, 5-methyluridine, or 5-hydroxymethyluridine
  misc_difference 2986: note = n indicates uridine, 5-methyluridine, or 5-hydroxymethyluridine
  misc_difference 2994: note = n indicates uridine, 5-methyluridine, or 5-hydroxymethyluridine
  misc_difference 3008: note = n indicates uridine, 5-methyluridine, or 5-hydroxymethyluridine
  misc_difference 3011: note = n indicates uridine, 5-methyluridine, or 5-hydroxymethyluridine
  misc_difference 3016: note = n indicates uridine, 5-methyluridine, or 5-hydroxymethyluridine
  misc_difference 3019: note = n indicates uridine, 5-methyluridine, or 5-hydroxymethyluridine
  misc_difference 3028: note = n indicates uridine, 5-methyluridine, or 5-hydroxymethyluridine
  misc_difference 3030: note = n indicates uridine, 5-methyluridine, or 5-hydroxymethyluridine
  misc_difference 3031: note = n indicates uridine, 5-methyluridine, or 5-hydroxymethyluridine
  misc_difference 3047: note = n indicates uridine, 5-methyluridine, or 5-hydroxymethyluridine
  misc_difference 3055: note = n indicates uridine, 5-methyluridine, or 5-hydroxymethyluridine
  misc_difference 3057: note = n indicates uridine, 5-methyluridine, or 5-hydroxymethyluridine
  misc_difference 3058: note = n indicates uridine, 5-methyluridine, or 5-hydroxymethyluridine
  misc_difference 3065: note = n indicates uridine, 5-methyluridine, or 5-hydroxymethyluridine
  misc_difference 3076: note = n indicates uridine, 5-methyluridine, or 5-hydroxymethyluridine
  misc_difference 3078: note = n indicates uridine, 5-methyluridine, or 5-hydroxymethyluridine
  misc_difference 3080: note = n indicates uridine, 5-methyluridine, or 5-hydroxymethyluridine
  misc_difference 3081: note = n indicates uridine, 5-methyluridine, or 5-hydroxymethyluridine
  misc_difference 3092: note = n indicates uridine, 5-methyluridine, or 5-hydroxymethyluridine
  misc_difference 3093: note = n indicates uridine, 5-methyluridine, or 5-hydroxymethyluridine
  misc_difference 3094: note = n indicates uridine, 5-methyluridine, or 5-hydroxymethyluridine
  misc_difference 3097: note = n indicates uridine, 5-methyluridine, or 5-hydroxymethyluridine
  misc_difference 3103: note = n indicates uridine, 5-methyluridine, or 5-hydroxymethyluridine
  misc_difference 3106: note = n indicates uridine, 5-methyluridine, or 5-hydroxymethyluridine
  misc_difference 3116: note = n indicates uridine, 5-methyluridine, or 5-hydroxymethyluridine
  misc_difference 3121: note = n indicates uridine, 5-methyluridine, or 5-hydroxymethyluridine
  misc_difference 3127: note = n indicates uridine, 5-methyluridine, or 5-hydroxymethyluridine
  misc_difference 3134: note = n indicates uridine, 5-methyluridine, or 5-hydroxymethyluridine
  misc_difference 3141: note = n indicates uridine, 5-methyluridine, or 5-hydroxymethyluridine
  misc_difference 3149: note = n indicates uridine, 5-methyluridine, or 5-hydroxymethyluridine
  misc_difference 3151: note = n indicates uridine, 5-methyluridine, or 5-hydroxymethyluridine
  misc_difference 3155: note = n indicates uridine, 5-methyluridine, or 5-hydroxymethyluridine
  misc_difference 3156: note = n indicates uridine, 5-methyluridine, or 5-hydroxymethyluridine
  misc_difference 3158: note = n indicates uridine, 5-methyluridine, or 5-hydroxymethyluridine
  misc_difference 3159: note = n indicates uridine, 5-methyluridine, or 5-hydroxymethyluridine
  misc_difference 3160: note = n indicates uridine, 5-methyluridine, or 5-hydroxymethyluridine
  misc_difference 3161: note = n indicates uridine, 5-methyluridine, or 5-hydroxymethyluridine
  misc_difference 3176: note = n indicates uridine, 5-methyluridine, or 5-hydroxymethyluridine
  misc_difference 3180: note = n indicates uridine, 5-methyluridine, or 5-hydroxymethyluridine
  misc_difference 3190: note = n indicates uridine, 5-methyluridine, or 5-hydroxymethyluridine
  misc_difference 3193: note = n indicates uridine, 5-methyluridine, or 5-hydroxymethyluridine
  misc_difference 3195: note = n indicates uridine, 5-methyluridine, or 5-hydroxymethyluridine
  misc_difference 3196: note = n indicates uridine, 5-methyluridine, or 5-hydroxymethyluridine
  misc_difference 3205: note = n indicates uridine, 5-methyluridine, or 5-hydroxymethyluridine
  misc_difference 3207: note = n indicates uridine, 5-methyluridine, or 5-hydroxymethyluridine
  misc_difference 3211: note = n indicates uridine, 5-methyluridine, or 5-hydroxymethyluridine
  misc_difference 3216: note = n indicates uridine, 5-methyluridine, or 5-hydroxymethyluridine
  misc_difference 3217: note = n indicates uridine, 5-methyluridine, or 5-hydroxymethyluridine
  misc_difference 3219: note = n indicates uridine, 5-methyluridine, or 5-hydroxymethyluridine
  misc_difference 3220: note = n indicates uridine, 5-methyluridine, or 5-hydroxymethyluridine
  misc_difference 3221: note = n indicates uridine, 5-methyluridine, or 5-hydroxymethyluridine
  misc_difference 3226: note = n indicates uridine, 5-methyluridine, or 5-hydroxymethyluridine
  misc_difference 3230: note = n indicates uridine, 5-methyluridine, or 5-hydroxymethyluridine
  misc_difference 3232: note = n indicates uridine, 5-methyluridine, or 5-hydroxymethyluridine
  misc_difference 3237: note = n indicates uridine, 5-methyluridine, or 5-hydroxymethyluridine
  misc_difference 3242: note = n indicates uridine, 5-methyluridine, or 5-hydroxymethyluridine
  misc_difference 3244: note = n indicates uridine, 5-methyluridine, or 5-hydroxymethyluridine
  misc_difference 3246: note = n indicates uridine, 5-methyluridine, or 5-hydroxymethyluridine
  misc_difference 3247: note = n indicates uridine, 5-methyluridine, or 5-hydroxymethyluridine
  misc_difference 3248: note = n indicates uridine, 5-methyluridine, or 5-hydroxymethyluridine
  misc_difference 3249: note = n indicates uridine, 5-methyluridine, or 5-hydroxymethyluridine
  misc_difference 3251: note = n indicates uridine, 5-methyluridine, or 5-hydroxymethyluridine
  misc_difference 3260: note = n indicates uridine, 5-methyluridine, or 5-hydroxymethyluridine
  misc_difference 3262: note = n indicates uridine, 5-methyluridine, or 5-hydroxymethyluridine
  misc_difference 3263: note = n indicates uridine, 5-methyluridine, or 5-hydroxymethyluridine
  misc_difference 3267: note = n indicates uridine, 5-methyluridine, or 5-hydroxymethyluridine
  misc_difference 3268: note = n indicates uridine, 5-methyluridine, or 5-hydroxymethyluridine
  misc_difference 3270: note = n indicates uridine, 5-methyluridine, or 5-hydroxymethyluridine
  misc_difference 3274: note = n indicates uridine, 5-methyluridine, or 5-hydroxymethyluridine
  misc_difference 3275: note = n indicates uridine, 5-methyluridine, or 5-hydroxymethyluridine
  misc_difference 3281: note = n indicates uridine, 5-methyluridine, or 5-hydroxymethyluridine
  misc_difference 3284: note = n indicates uridine, 5-methyluridine, or 5-hydroxymethyluridine
  misc_difference 3288: note = n indicates uridine, 5-methyluridine, or 5-hydroxymethyluridine
  misc_difference 3293: note = n indicates uridine, 5-methyluridine, or 5-hydroxymethyluridine
  misc_difference 3297: note = n indicates uridine, 5-methyluridine, or 5-hydroxymethyluridine
  misc_difference 3303: note = n indicates uridine, 5-methyluridine, or 5-hydroxymethyluridine
  misc_difference 3308: note = n indicates uridine, 5-methyluridine, or 5-hydroxymethyluridine
  misc_difference 3313: note = n indicates uridine, 5-methyluridine, or 5-hydroxymethyluridine
  misc_difference 3315: note = n indicates uridine, 5-methyluridine, or 5-hydroxymethyluridine
  misc_difference 3322: note = n indicates uridine, 5-methyluridine, or 5-hydroxymethyluridine
  misc_difference 3326: note = n indicates uridine, 5-methyluridine, or 5-hydroxymethyluridine
  misc_difference 3334: note = n indicates uridine, 5-methyluridine, or 5-hydroxymethyluridine
  misc_difference 3337: note = n indicates uridine, 5-methyluridine, or 5-hydroxymethyluridine
  misc_difference 3341: note = n indicates uridine, 5-methyluridine, or 5-hydroxymethyluridine
  misc_difference 3346: note = n indicates uridine, 5-methyluridine, or 5-hydroxymethyluridine
  misc_difference 3348: note = n indicates uridine, 5-methyluridine, or 5-hydroxymethyluridine
  misc_difference 3350: note = n indicates uridine, 5-methyluridine, or 5-hydroxymethyluridine
  misc_difference 3357: note = n indicates uridine, 5-methyluridine, or 5-hydroxymethyluridine
  misc_difference 3367: note = n indicates uridine, 5-methyluridine, or 5-hydroxymethyluridine
  misc_difference 3371: note = n indicates uridine, 5-methyluridine, or 5-hydroxymethyluridine
  misc_difference 3379: note = n indicates uridine, 5-methyluridine, or 5-hydroxymethyluridine
  misc_difference 3380: note = n indicates uridine, 5-methyluridine, or 5-hydroxymethyluridine
  misc_difference 3386: note = n indicates uridine, 5-methyluridine, or 5-hydroxymethyluridine
  misc_difference 3394: note = n indicates uridine, 5-methyluridine, or 5-hydroxymethyluridine
  misc_difference 3396: note = n indicates uridine, 5-methyluridine, or 5-hydroxymethyluridine
  misc_difference 3398: note = n indicates uridine, 5-methyluridine, or 5-hydroxymethyluridine
  misc_difference 3403: note = n indicates uridine, 5-methyluridine, or 5-hydroxymethyluridine
  misc_difference 3410: note = n indicates uridine, 5-methyluridine, or 5-hydroxymethyluridine
  misc_difference 3413: note = n indicates uridine, 5-methyluridine, or 5-hydroxymethyluridine
  misc_difference 3418: note = n indicates uridine, 5-methyluridine, or 5-hydroxymethyluridine
  misc_difference 3425: note = n indicates uridine, 5-methyluridine, or 5-hydroxymethyluridine
  misc_difference 3426: note = n indicates uridine, 5-methyluridine, or 5-hydroxymethyluridine
  misc_difference 3428: note = n indicates uridine, 5-methyluridine, or 5-hydroxymethyluridine
  misc_difference 3431: note = n indicates uridine, 5-methyluridine, or 5-hydroxymethyluridine
  misc_difference 3439: note = n indicates uridine, 5-methyluridine, or 5-hydroxymethyluridine
  misc_difference 3445: note = n indicates uridine, 5-methyluridine, or 5-hydroxymethyluridine
  misc_difference 3448: note = n indicates uridine, 5-methyluridine, or 5-hydroxymethyluridine
  misc_difference 3452: note = n indicates uridine, 5-methyluridine, or 5-hydroxymethyluridine
  misc_difference 3454: note = n indicates uridine, 5-methyluridine, or 5-hydroxymethyluridine
  misc_difference 3466: note = n indicates uridine, 5-methyluridine, or 5-hydroxymethyluridine
  misc_difference 3470: note = n indicates uridine, 5-methyluridine, or 5-hydroxymethyluridine
  misc_difference 3473: note = n indicates uridine, 5-methyluridine, or 5-hydroxymethyluridine
  misc_difference 3476: note = n indicates uridine, 5-methyluridine, or 5-hydroxymethyluridine
  misc_difference 3477: note = n indicates uridine, 5-methyluridine, or 5-hydroxymethyluridine
  misc_difference 3478: note = n indicates uridine, 5-methyluridine, or 5-hydroxymethyluridine
  misc_difference 3481: note = n indicates uridine, 5-methyluridine, or 5-hydroxymethyluridine
  misc_difference 3484: note = n indicates uridine, 5-methyluridine, or 5-hydroxymethyluridine
  misc_difference 3491: note = n indicates uridine, 5-methyluridine, or 5-hydroxymethyluridine
  misc_difference 3494: note = n indicates uridine, 5-methyluridine, or 5-hydroxymethyluridine
  misc_difference 3509: note = n indicates uridine, 5-methyluridine, or 5-hydroxymethyluridine
  misc_difference 3513: note = n indicates uridine, 5-methyluridine, or 5-hydroxymethyluridine
  misc_difference 3514: note = n indicates uridine, 5-methyluridine, or 5-hydroxymethyluridine
  misc_difference 3515: note = n indicates uridine, 5-methyluridine, or 5-hydroxymethyluridine
  misc_difference 3516: note = n indicates uridine, 5-methyluridine, or 5-hydroxymethyluridine
  misc_difference 3518: note = n indicates uridine, 5-methyluridine, or 5-hydroxymethyluridine
  misc_difference 3519: note = n indicates uridine, 5-methyluridine, or 5-hydroxymethyluridine
  misc_difference 3522: note = n indicates uridine, 5-methyluridine, or 5-hydroxymethyluridine
  misc_difference 3523: note = n indicates uridine, 5-methyluridine, or 5-hydroxymethyluridine
  misc_difference 3526: note = n indicates uridine, 5-methyluridine, or 5-hydroxymethyluridine
  misc_difference 3534: note = n indicates uridine, 5-methyluridine, or 5-hydroxymethyluridine
  misc_difference 3535: note = n indicates uridine, 5-methyluridine, or 5-hydroxymethyluridine
  misc_difference 3548: note = n indicates uridine, 5-methyluridine, or 5-hydroxymethyluridine
  misc_difference 3550: note = n indicates uridine, 5-methyluridine, or 5-hydroxymethyluridine
  misc_difference 3553: note = n indicates uridine, 5-methyluridine, or 5-hydroxymethyluridine
  misc_difference 3556: note = n indicates uridine, 5-methyluridine, or 5-hydroxymethyluridine
  misc_difference 3559: note = n indicates uridine, 5-methyluridine, or 5-hydroxymethyluridine
  misc_difference 3570: note = n indicates uridine, 5-methyluridine, or 5-hydroxymethyluridine
  misc_difference 3571: note = n indicates uridine, 5-methyluridine, or 5-hydroxymethyluridine
  misc_difference 3573: note = n indicates uridine, 5-methyluridine, or 5-hydroxymethyluridine
  misc_difference 3577: note = n indicates uridine, 5-methyluridine, or 5-hydroxymethyluridine
  misc_difference 3589: note = n indicates uridine, 5-methyluridine, or 5-hydroxymethyluridine
  misc_difference 3592: note = n indicates uridine, 5-methyluridine, or 5-hydroxymethyluridine
  misc_difference 3593: note = n indicates uridine, 5-methyluridine, or 5-hydroxymethyluridine
  misc_difference 3597: note = n indicates uridine, 5-methyluridine, or 5-hydroxymethyluridine
  misc_difference 3600: note = n indicates uridine, 5-methyluridine, or 5-hydroxymethyluridine
  misc_difference 3601: note = n indicates uridine, 5-methyluridine, or 5-hydroxymethyluridine
  misc_difference 3603: note = n indicates uridine, 5-methyluridine, or 5-hydroxymethyluridine
  misc_difference 3614: note = n indicates uridine, 5-methyluridine, or 5-hydroxymethyluridine
  misc_difference 3620: note = n indicates uridine, 5-methyluridine, or 5-hydroxymethyluridine
  misc_difference 3624: note = n indicates uridine, 5-methyluridine, or 5-hydroxymethyluridine
  misc_difference 3625: note = n indicates uridine, 5-methyluridine, or 5-hydroxymethyluridine
  misc_difference 3632: note = n indicates uridine, 5-methyluridine, or 5-hydroxymethyluridine
  misc_difference 3637: note = n indicates uridine, 5-methyluridine, or 5-hydroxymethyluridine
  misc_difference 3641: note = n indicates uridine, 5-methyluridine, or 5-hydroxymethyluridine
  misc_difference 3642: note = n indicates uridine, 5-methyluridine, or 5-hydroxymethyluridine
  misc_difference 3643: note = n indicates uridine, 5-methyluridine, or 5-hydroxymethyluridine
  misc_difference 3649: note = n indicates uridine, 5-methyluridine, or 5-hydroxymethyluridine
  misc_difference 3656: note = n indicates uridine, 5-methyluridine, or 5-hydroxymethyluridine
  misc_difference 3659: note = n indicates uridine, 5-methyluridine, or 5-hydroxymethyluridine
  misc_difference 3661: note = n indicates uridine, 5-methyluridine, or 5-hydroxymethyluridine
  misc_difference 3669: note = n indicates uridine, 5-methyluridine, or 5-hydroxymethyluridine
  misc_difference 3671: note = n indicates uridine, 5-methyluridine, or 5-hydroxymethyluridine
  misc_difference 3676: note = n indicates uridine, 5-methyluridine, or 5-hydroxymethyluridine
  misc_difference 3679: note = n indicates uridine, 5-methyluridine, or 5-hydroxymethyluridine
  misc_difference 3681: note = n indicates uridine, 5-methyluridine, or 5-hydroxymethyluridine
  misc_difference 3682: note = n indicates uridine, 5-methyluridine, or 5-hydroxymethyluridine
  misc_difference 3683: note = n indicates uridine, 5-methyluridine, or 5-hydroxymethyluridine
  misc_difference 3685: note = n indicates uridine, 5-methyluridine, or 5-hydroxymethyluridine
  misc_difference 3686: note = n indicates uridine, 5-methyluridine, or 5-hydroxymethyluridine
  misc_difference 3689: note = n indicates uridine, 5-methyluridine, or 5-hydroxymethyluridine
  misc_difference 3691: note = n indicates uridine, 5-methyluridine, or 5-hydroxymethyluridine
  misc_difference 3702: note = n indicates uridine, 5-methyluridine, or 5-hydroxymethyluridine
  misc_difference 3704: note = n indicates uridine, 5-methyluridine, or 5-hydroxymethyluridine
  misc_difference 3708: note = n indicates uridine, 5-methyluridine, or 5-hydroxymethyluridine
  misc_difference 3713: note = n indicates uridine, 5-methyluridine, or 5-hydroxymethyluridine
  misc_difference 3717: note = n indicates uridine, 5-methyluridine, or 5-hydroxymethyluridine
  misc_difference 3719: note = n indicates uridine, 5-methyluridine, or 5-hydroxymethyluridine
  misc_difference 3726: note = n indicates uridine, 5-methyluridine, or 5-hydroxymethyluridine
  misc_difference 3728: note = n indicates uridine, 5-methyluridine, or 5-hydroxymethyluridine
  misc_difference 3737: note = n indicates uridine, 5-methyluridine, or 5-hydroxymethyluridine
  misc_difference 3742: note = n indicates uridine, 5-methyluridine, or 5-hydroxymethyluridine
  misc_difference 3743: note = n indicates uridine, 5-methyluridine, or 5-hydroxymethyluridine
  misc_difference 3748: note = n indicates uridine, 5-methyluridine, or 5-hydroxymethyluridine
  misc_difference 3749: note = n indicates uridine, 5-methyluridine, or 5-hydroxymethyluridine
  misc_difference 3754: note = n indicates uridine, 5-methyluridine, or 5-hydroxymethyluridine
  misc_difference 3756: note = n indicates uridine, 5-methyluridine, or 5-hydroxymethyluridine
  misc_difference 3757: note = n indicates uridine, 5-methyluridine, or 5-hydroxymethyluridine
  misc_difference 3770: note = n indicates uridine, 5-methyluridine, or 5-hydroxymethyluridine
  misc_difference 3771: note = n indicates uridine, 5-methyluridine, or 5-hydroxymethyluridine
  misc_difference 3773: note = n indicates uridine, 5-methyluridine, or 5-hydroxymethyluridine
  misc_difference 3775: note = n indicates uridine, 5-methyluridine, or 5-hydroxymethyluridine
  misc_difference 3779: note = n indicates uridine, 5-methyluridine, or 5-hydroxymethyluridine
  misc_difference 3781: note = n indicates uridine, 5-methyluridine, or 5-hydroxymethyluridine
  misc_difference 3785: note = n indicates uridine, 5-methyluridine, or 5-hydroxymethyluridine
  misc_difference 3798: note = n indicates uridine, 5-methyluridine, or 5-hydroxymethyluridine
  misc_difference 3800: note = n indicates uridine, 5-methyluridine, or 5-hydroxymethyluridine
  misc_difference 3802: note = n indicates uridine, 5-methyluridine, or 5-hydroxymethyluridine
  misc_difference 3808: note = n indicates uridine, 5-methyluridine, or 5-hydroxymethyluridine
  misc_difference 3812: note = n indicates uridine, 5-methyluridine, or 5-hydroxymethyluridine
  misc_difference 3813: note = n indicates uridine, 5-methyluridine, or 5-hydroxymethyluridine
  misc_difference 3815: note = n indicates uridine, 5-methyluridine, or 5-hydroxymethyluridine
  misc_difference 3818: note = n indicates uridine, 5-methyluridine, or 5-hydroxymethyluridine
  misc_difference 3819: note = n indicates uridine, 5-methyluridine, or 5-hydroxymethyluridine
  misc_difference 3824: note = n indicates uridine, 5-methyluridine, or 5-hydroxymethyluridine
  misc_difference 3844: note = n indicates uridine, 5-methyluridine, or 5-hydroxymethyluridine
  misc_difference 3847: note = n indicates uridine, 5-methyluridine, or 5-hydroxymethyluridine
  misc_difference 3848: note = n indicates uridine, 5-methyluridine, or 5-hydroxymethyluridine
  misc_difference 3851: note = n indicates uridine, 5-methyluridine, or 5-hydroxymethyluridine
  misc_difference 3854: note = n indicates uridine, 5-methyluridine, or 5-hydroxymethyluridine
  misc_difference 3856: note = n indicates uridine, 5-methyluridine, or 5-hydroxymethyluridine
  misc_difference 3867: note = n indicates uridine, 5-methyluridine, or 5-hydroxymethyluridine
  misc_difference 3868: note = n indicates uridine, 5-methyluridine, or 5-hydroxymethyluridine
  misc_difference 3873: note = n indicates uridine, 5-methyluridine, or 5-hydroxymethyluridine
  misc_difference 3874: note = n indicates uridine, 5-methyluridine, or 5-hydroxymethyluridine
  misc_difference 3875: note = n indicates uridine, 5-methyluridine, or 5-hydroxymethyluridine
  misc_difference 3876: note = n indicates uridine, 5-methyluridine, or 5-hydroxymethyluridine
  misc_difference 3883: note = n indicates uridine, 5-methyluridine, or 5-hydroxymethyluridine
  misc_difference 3885: note = n indicates uridine, 5-methyluridine, or 5-hydroxymethyluridine
  misc_difference 3897: note = n indicates uridine, 5-methyluridine, or 5-hydroxymethyluridine
  misc_difference 3900: note = n indicates uridine, 5-methyluridine, or 5-hydroxymethyluridine
  misc_difference 3904: note = n indicates uridine, 5-methyluridine, or 5-hydroxymethyluridine
  misc_difference 3905: note = n indicates uridine, 5-methyluridine, or 5-hydroxymethyluridine
  misc_difference 3919: note = n indicates uridine, 5-methyluridine, or 5-hydroxymethyluridine
  misc_difference 3920: note = n indicates uridine, 5-methyluridine, or 5-hydroxymethyluridine
  misc_difference 3922: note = n indicates uridine, 5-methyluridine, or 5-hydroxymethyluridine
  misc_difference 3924: note = n indicates uridine, 5-methyluridine, or 5-hydroxymethyluridine
  misc_difference 3925: note = n indicates uridine, 5-methyluridine, or 5-hydroxymethyluridine
  misc_difference 3926: note = n indicates uridine, 5-methyluridine, or 5-hydroxymethyluridine
  misc_difference 3928: note = n indicates uridine, 5-methyluridine, or 5-hydroxymethyluridine
  misc_difference 3930: note = n indicates uridine, 5-methyluridine, or 5-hydroxymethyluridine
  misc_difference 3931: note = n indicates uridine, 5-methyluridine, or 5-hydroxymethyluridine
  misc_difference 3934: note = n indicates uridine, 5-methyluridine, or 5-hydroxymethyluridine
  misc_difference 3935: note = n indicates uridine, 5-methyluridine, or 5-hydroxymethyluridine
  misc_difference 3939: note = n indicates uridine, 5-methyluridine, or 5-hydroxymethyluridine
  misc_difference 3944: note = n indicates uridine, 5-methyluridine, or 5-hydroxymethyluridine
  misc_difference 3956: note = n indicates uridine, 5-methyluridine, or 5-hydroxymethyluridine
  misc_difference 3965: note = n indicates uridine, 5-methyluridine, or 5-hydroxymethyluridine
  misc_difference 3966: note = n indicates uridine, 5-methyluridine, or 5-hydroxymethyluridine
  misc_difference 3968: note = n indicates uridine, 5-methyluridine, or 5-hydroxymethyluridine
  misc_difference 3969: note = n indicates uridine, 5-methyluridine, or 5-hydroxymethyluridine
  misc_difference 3976: note = n indicates uridine, 5-methyluridine, or 5-hydroxymethyluridine
  misc_difference 3977: note = n indicates uridine, 5-methyluridine, or 5-hydroxymethyluridine
  misc_difference 3978: note = n indicates uridine, 5-methyluridine, or 5-hydroxymethyluridine
  misc_difference 3981: note = n indicates uridine, 5-methyluridine, or 5-hydroxymethyluridine
  misc_difference 3987: note = n indicates uridine, 5-methyluridine, or 5-hydroxymethyluridine
  misc_difference 3988: note = n indicates uridine, 5-methyluridine, or 5-hydroxymethyluridine
  misc_difference 3997: note = n indicates uridine, 5-methyluridine, or 5-hydroxymethyluridine
  misc_difference 3998: note = n indicates uridine, 5-methyluridine, or 5-hydroxymethyluridine
  misc_difference 3999: note = n indicates uridine, 5-methyluridine, or 5-hydroxymethyluridine
  misc_difference 4001: note = n indicates uridine, 5-methyluridine, or 5-hydroxymethyluridine
  misc_difference 4007: note = n indicates uridine, 5-methyluridine, or 5-hydroxymethyluridine
  misc_difference 4008: note = n indicates uridine, 5-methyluridine, or 5-hydroxymethyluridine
  misc_difference 4015: note = n indicates uridine, 5-methyluridine, or 5-hydroxymethyluridine
  misc_difference 4029: note = n indicates uridine, 5-methyluridine, or 5-hydroxymethyluridine
  misc_difference 4031: note = n indicates uridine, 5-methyluridine, or 5-hydroxymethyluridine
  misc_difference 4038: note = n indicates uridine, 5-methyluridine, or 5-hydroxymethyluridine
  misc_difference 4041: note = n indicates uridine, 5-methyluridine, or 5-hydroxymethyluridine
  misc_difference 4043: note = n indicates uridine, 5-methyluridine, or 5-hydroxymethyluridine
  misc_difference 4046: note = n indicates uridine, 5-methyluridine, or 5-hydroxymethyluridine
  misc_difference 4048: note = n indicates uridine, 5-methyluridine, or 5-hydroxymethyluridine
  misc_difference 4051: note = n indicates uridine, 5-methyluridine, or 5-hydroxymethyluridine
  misc_difference 4061: note = n indicates uridine, 5-methyluridine, or 5-hydroxymethyluridine
  misc_difference 4063: note = n indicates uridine, 5-methyluridine, or 5-hydroxymethyluridine
  misc_difference 4064: note = n indicates uridine, 5-methyluridine, or 5-hydroxymethyluridine
  misc_difference 4084: note = n indicates uridine, 5-methyluridine, or 5-hydroxymethyluridine
  misc_difference 4087: note = n indicates uridine, 5-methyluridine, or 5-hydroxymethyluridine
  misc_difference 4088: note = n indicates uridine, 5-methyluridine, or 5-hydroxymethyluridine
  misc_difference 4090: note = n indicates uridine, 5-methyluridine, or 5-hydroxymethyluridine
  misc_difference 4094: note = n indicates uridine, 5-methyluridine, or 5-hydroxymethyluridine
  misc_difference 4097: note = n indicates uridine, 5-methyluridine, or 5-hydroxymethyluridine
  misc_difference 4100: note = n indicates uridine, 5-methyluridine, or 5-hydroxymethyluridine
  misc_difference 4118: note = n indicates uridine, 5-methyluridine, or 5-hydroxymethyluridine
  misc_difference 4129: note = n indicates uridine, 5-methyluridine, or 5-hydroxymethyluridine
  misc_difference 4131: note = n indicates uridine, 5-methyluridine, or 5-hydroxymethyluridine
  misc_difference 4141: note = n indicates uridine, 5-methyluridine, or 5-hydroxymethyluridine
  misc_difference 4143: note = n indicates uridine, 5-methyluridine, or 5-hydroxymethyluridine
  misc_difference 4145: note = n indicates uridine, 5-methyluridine, or 5-hydroxymethyluridine
  misc_difference 4152: note = n indicates uridine, 5-methyluridine, or 5-hydroxymethyluridine
  misc_difference 4153: note = n indicates uridine, 5-methyluridine, or 5-hydroxymethyluridine
  misc_difference 4164: note = n indicates uridine, 5-methyluridine, or 5-hydroxymethyluridine
  misc_difference 4165: note = n indicates uridine, 5-methyluridine, or 5-hydroxymethyluridine
  misc_difference 4169: note = n indicates uridine, 5-methyluridine, or 5-hydroxymethyluridine
  misc_difference 4170: note = n indicates uridine, 5-methyluridine, or 5-hydroxymethyluridine
  misc_difference 4171: note = n indicates uridine, 5-methyluridine, or 5-hydroxymethyluridine
  misc_difference 4180: note = n indicates uridine, 5-methyluridine, or 5-hydroxymethyluridine
  misc_difference 4186: note = n indicates uridine, 5-methyluridine, or 5-hydroxymethyluridine
  misc_difference 4201: note = n indicates uridine, 5-methyluridine, or 5-hydroxymethyluridine
  misc_difference 4204: note = n indicates uridine, 5-methyluridine, or 5-hydroxymethyluridine
  misc_difference 4211: note = n indicates uridine, 5-methyluridine, or 5-hydroxymethyluridine
  misc_difference 4217: note = n indicates uridine, 5-methyluridine, or 5-hydroxymethyluridine
  misc_difference 4223: note = n indicates uridine, 5-methyluridine, or 5-hydroxymethyluridine
  misc_difference 4225: note = n indicates uridine, 5-methyluridine, or 5-hydroxymethyluridine
  misc_difference 4228: note = n indicates uridine, 5-methyluridine, or 5-hydroxymethyluridine
  misc_difference 4229: note = n indicates uridine, 5-methyluridine, or 5-hydroxymethyluridine
  misc_difference 4232: note = n indicates uridine, 5-methyluridine, or 5-hydroxymethyluridine
  misc_difference 4237: note = n indicates uridine, 5-methyluridine, or 5-hydroxymethyluridine
  misc_difference 4248: note = n indicates uridine, 5-methyluridine, or 5-hydroxymethyluridine
  misc_difference 4249: note = n indicates uridine, 5-methyluridine, or 5-hydroxymethyluridine
  misc_difference 4258: note = n indicates uridine, 5-methyluridine, or 5-hydroxymethyluridine
  misc_difference 4259: note = n indicates uridine, 5-methyluridine, or 5-hydroxymethyluridine
  misc_difference 4260: note = n indicates uridine, 5-methyluridine, or 5-hydroxymethyluridine
  misc_difference 4267: note = n indicates uridine, 5-methyluridine, or 5-hydroxymethyluridine
  misc_difference 4268: note = n indicates uridine, 5-methyluridine, or 5-hydroxymethyluridine
  misc_difference 4274: note = n indicates uridine, 5-methyluridine, or 5-hydroxymethyluridine
  misc_difference 4284: note = n indicates uridine, 5-methyluridine, or 5-hydroxymethyluridine
  misc_difference 4285: note = n indicates uridine, 5-methyluridine, or 5-hydroxymethyluridine
  misc_difference 4295: note = n indicates uridine, 5-methyluridine, or 5-hydroxymethyluridine
  misc_difference 4296: note = n indicates uridine, 5-methyluridine, or 5-hydroxymethyluridine
  misc_difference 4298: note = n indicates uridine, 5-methyluridine, or 5-hydroxymethyluridine
  misc_difference 4302: note = n indicates uridine, 5-methyluridine, or 5-hydroxymethyluridine
  misc_difference 4306: note = n indicates uridine, 5-methyluridine, or 5-hydroxymethyluridine
  misc_difference 4310: note = n indicates uridine, 5-methyluridine, or 5-hydroxymethyluridine
  misc_difference 4315: note = n indicates uridine, 5-methyluridine, or 5-hydroxymethyluridine
  misc_difference 4316: note = n indicates uridine, 5-methyluridine, or 5-hydroxymethyluridine
  misc_difference 4318: note = n indicates uridine, 5-methyluridine, or 5-hydroxymethyluridine
  misc_difference 4325: note = n indicates uridine, 5-methyluridine, or 5-hydroxymethyluridine
  misc_difference 4331: note = n indicates uridine, 5-methyluridine, or 5-hydroxymethyluridine
  misc_difference 4332: note = n indicates uridine, 5-methyluridine, or 5-hydroxymethyluridine
  misc_difference 4338: note = n indicates uridine, 5-methyluridine, or 5-hydroxymethyluridine
  misc_difference 4342: note = n indicates uridine, 5-methyluridine, or 5-hydroxymethyluridine
  misc_difference 4348: note = n indicates uridine, 5-methyluridine, or 5-hydroxymethyluridine
  misc_difference 4349: note = n indicates uridine, 5-methyluridine, or 5-hydroxymethyluridine
  misc_difference 4354: note = n indicates uridine, 5-methyluridine, or 5-hydroxymethyluridine
  misc_difference 4356: note = n indicates uridine, 5-methyluridine, or 5-hydroxymethyluridine
  misc_difference 4357: note = n indicates uridine, 5-methyluridine, or 5-hydroxymethyluridine
  misc_difference 4359: note = n indicates uridine, 5-methyluridine, or 5-hydroxymethyluridine
  misc_difference 4369: note = n indicates uridine, 5-methyluridine, or 5-hydroxymethyluridine
  misc_difference 4371: note = n indicates uridine, 5-methyluridine, or 5-hydroxymethyluridine
  misc_difference 4372: note = n indicates uridine, 5-methyluridine, or 5-hydroxymethyluridine
  misc_difference 4373: note = n indicates uridine, 5-methyluridine, or 5-hydroxymethyluridine
  misc_difference 4374: note = n indicates uridine, 5-methyluridine, or 5-hydroxymethyluridine
  misc_difference 4388: note = n indicates uridine, 5-methyluridine, or 5-hydroxymethyluridine
  misc_difference 4393: note = n indicates uridine, 5-methyluridine, or 5-hydroxymethyluridine
  misc_difference 4401: note = n indicates uridine, 5-methyluridine, or 5-hydroxymethyluridine
  misc_difference 4404: note = n indicates uridine, 5-methyluridine, or 5-hydroxymethyluridine
  misc_difference 4405: note = n indicates uridine, 5-methyluridine, or 5-hydroxymethyluridine
  misc_difference 4412: note = n indicates uridine, 5-methyluridine, or 5-hydroxymethyluridine
  misc_difference 4413: note = n indicates uridine, 5-methyluridine, or 5-hydroxymethyluridine
  misc_difference 4414: note = n indicates uridine, 5-methyluridine, or 5-hydroxymethyluridine
  misc_difference 4417: note = n indicates uridine, 5-methyluridine, or 5-hydroxymethyluridine
  misc_difference 4424: note = n indicates uridine, 5-methyluridine, or 5-hydroxymethyluridine
  misc_difference 4425: note = n indicates uridine, 5-methyluridine, or 5-hydroxymethyluridine
  misc_difference 4426: note = n indicates uridine, 5-methyluridine, or 5-hydroxymethyluridine
  misc_difference 4436: note = n indicates uridine, 5-methyluridine, or 5-hydroxymethyluridine
  misc_difference 4439: note = n indicates uridine, 5-methyluridine, or 5-hydroxymethyluridine
  misc_difference 4445: note = n indicates uridine, 5-methyluridine, or 5-hydroxymethyluridine
  misc_difference 4447: note = n indicates uridine, 5-methyluridine, or 5-hydroxymethyluridine
  misc_difference 4453: note = n indicates uridine, 5-methyluridine, or 5-hydroxymethyluridine
  misc_difference 4455: note = n indicates uridine, 5-methyluridine, or 5-hydroxymethyluridine
  misc_difference 4458: note = n indicates uridine, 5-methyluridine, or 5-hydroxymethyluridine
  misc_difference 4473: note = n indicates uridine, 5-methyluridine, or 5-hydroxymethyluridine
  misc_difference 4480: note = n indicates uridine, 5-methyluridine, or 5-hydroxymethyluridine
  misc_difference 4484: note = n indicates uridine, 5-methyluridine, or 5-hydroxymethyluridine
  misc_difference 4486: note = n indicates uridine, 5-methyluridine, or 5-hydroxymethyluridine
  misc_difference 4498: note = n indicates uridine, 5-methyluridine, or 5-hydroxymethyluridine
  misc_difference 4502: note = n indicates uridine, 5-methyluridine, or 5-hydroxymethyluridine
  misc_difference 4516: note = n indicates uridine, 5-methyluridine, or 5-hydroxymethyluridine
  misc_difference 4525: note = n indicates uridine, 5-methyluridine, or 5-hydroxymethyluridine
  misc_difference 4527: note = n indicates uridine, 5-methyluridine, or 5-hydroxymethyluridine
  misc_difference 4531: note = n indicates uridine, 5-methyluridine, or 5-hydroxymethyluridine
  misc_difference 4533: note = n indicates uridine, 5-methyluridine, or 5-hydroxymethyluridine
  misc_difference 4542: note = n indicates uridine, 5-methyluridine, or 5-hydroxymethyluridine
  misc_difference 4544: note = n indicates uridine, 5-methyluridine, or 5-hydroxymethyluridine
  misc_difference 4545: note = n indicates uridine, 5-methyluridine, or 5-hydroxymethyluridine
  misc_difference 4549: note = n indicates uridine, 5-methyluridine, or 5-hydroxymethyluridine
  misc_difference 4559: note = n indicates uridine, 5-methyluridine, or 5-hydroxymethyluridine
  misc_difference 4562: note = n indicates uridine, 5-methyluridine, or 5-hydroxymethyluridine
  misc_difference 4570: note = n indicates uridine, 5-methyluridine, or 5-hydroxymethyluridine
  misc_difference 4573: note = n indicates uridine, 5-methyluridine, or 5-hydroxymethyluridine
  misc_difference 4579: note = n indicates uridine, 5-methyluridine, or 5-hydroxymethyluridine
  misc_difference 4583: note = n indicates uridine, 5-methyluridine, or 5-hydroxymethyluridine
  misc_difference 4592: note = n indicates uridine, 5-methyluridine, or 5-hydroxymethyluridine
  misc_difference 4593: note = n indicates uridine, 5-methyluridine, or 5-hydroxymethyluridine
  misc_difference 4595: note = n indicates uridine, 5-methyluridine, or 5-hydroxymethyluridine
  misc_difference 4596: note = n indicates uridine, 5-methyluridine, or 5-hydroxymethyluridine
  misc_difference 4597: note = n indicates uridine, 5-methyluridine, or 5-hydroxymethyluridine
  misc_difference 4601: note = n indicates uridine, 5-methyluridine, or 5-hydroxymethyluridine
  misc_difference 4614: note = n indicates uridine, 5-methyluridine, or 5-hydroxymethyluridine
  misc_difference 4628: note = n indicates uridine, 5-methyluridine, or 5-hydroxymethyluridine
  misc_difference 4637: note = n indicates uridine, 5-methyluridine, or 5-hydroxymethyluridine
  misc_difference 4638: note = n indicates uridine, 5-methyluridine, or 5-hydroxymethyluridine
  misc_difference 4639: note = n indicates uridine, 5-methyluridine, or 5-hydroxymethyluridine
  misc_difference 4641: note = n indicates uridine, 5-methyluridine, or 5-hydroxymethyluridine
  misc_difference 4644: note = n indicates uridine, 5-methyluridine, or 5-hydroxymethyluridine
  misc_difference 4646: note = n indicates uridine, 5-methyluridine, or 5-hydroxymethyluridine
  misc_difference 4647: note = n indicates uridine, 5-methyluridine, or 5-hydroxymethyluridine
  misc_difference 4648: note = n indicates uridine, 5-methyluridine, or 5-hydroxymethyluridine
  misc_difference 4662: note = n indicates uridine, 5-methyluridine, or 5-hydroxymethyluridine
  misc_difference 4663: note = n indicates uridine, 5-methyluridine, or 5-hydroxymethyluridine
  misc_difference 4664: note = n indicates uridine, 5-methyluridine, or 5-hydroxymethyluridine
  misc_difference 4682: note = n indicates uridine, 5-methyluridine, or 5-hydroxymethyluridine
  misc_difference 4684: note = n indicates uridine, 5-methyluridine, or 5-hydroxymethyluridine
  misc_difference 4693: note = n indicates uridine, 5-methyluridine, or 5-hydroxymethyluridine
  misc_difference 4694: note = n indicates uridine, 5-methyluridine, or 5-hydroxymethyluridine
  misc_difference 4697: note = n indicates uridine, 5-methyluridine, or 5-hydroxymethyluridine
  misc_difference 4702: note = n indicates uridine, 5-methyluridine, or 5-hydroxymethyluridine
  misc_difference 4704: note = n indicates uridine, 5-methyluridine, or 5-hydroxymethyluridine
  misc_difference 4711: note = n indicates uridine, 5-methyluridine, or 5-hydroxymethyluridine
  misc_difference 4712: note = n indicates uridine, 5-methyluridine, or 5-hydroxymethyluridine
  misc_difference 4727: note = n indicates uridine, 5-methyluridine, or 5-hydroxymethyluridine
  misc_difference 4735: note = n indicates uridine, 5-methyluridine, or 5-hydroxymethyluridine
  misc_difference 4737: note = n indicates uridine, 5-methyluridine, or 5-hydroxymethyluridine
  misc_difference 4741: note = n indicates uridine, 5-methyluridine, or 5-hydroxymethyluridine
  misc_difference 4743: note = n indicates uridine, 5-methyluridine, or 5-hydroxymethyluridine
  misc_difference 4745: note = n indicates uridine, 5-methyluridine, or 5-hydroxymethyluridine
  misc_difference 4747: note = n indicates uridine, 5-methyluridine, or 5-hydroxymethyluridine
  misc_difference 4750: note = n indicates uridine, 5-methyluridine, or 5-hydroxymethyluridine
  misc_difference 4762: note = n indicates uridine, 5-methyluridine, or 5-hydroxymethyluridine
  misc_difference 4769: note = n indicates uridine, 5-methyluridine, or 5-hydroxymethyluridine
  misc_difference 4771: note = n indicates uridine, 5-methyluridine, or 5-hydroxymethyluridine
  misc_difference 4772: note = n indicates uridine, 5-methyluridine, or 5-hydroxymethyluridine
  misc_difference 4776: note = n indicates uridine, 5-methyluridine, or 5-hydroxymethyluridine
  misc_difference 4782: note = n indicates uridine, 5-methyluridine, or 5-hydroxymethyluridine
  misc_difference 4789: note = n indicates uridine, 5-methyluridine, or 5-hydroxymethyluridine
  misc_difference 4797: note = n indicates uridine, 5-methyluridine, or 5-hydroxymethyluridine
  misc_difference 4806: note = n indicates uridine, 5-methyluridine, or 5-hydroxymethyluridine
  misc_difference 4817: note = n indicates uridine, 5-methyluridine, or 5-hydroxymethyluridine
  misc_difference 4825: note = n indicates uridine, 5-methyluridine, or 5-hydroxymethyluridine
  misc_difference 4829: note = n indicates uridine, 5-methyluridine, or 5-hydroxymethyluridine
  misc_difference 4830: note = n indicates uridine, 5-methyluridine, or 5-hydroxymethyluridine
  misc_difference 4833: note = n indicates uridine, 5-methyluridine, or 5-hydroxymethyluridine
  misc_difference 4834: note = n indicates uridine, 5-methyluridine, or 5-hydroxymethyluridine
  misc_difference 4836: note = n indicates uridine, 5-methyluridine, or 5-hydroxymethyluridine
  misc_difference 4840: note = n indicates uridine, 5-methyluridine, or 5-hydroxymethyluridine
  misc_difference 4844: note = n indicates uridine, 5-methyluridine, or 5-hydroxymethyluridine
  misc_difference 4849: note = n indicates uridine, 5-methyluridine, or 5-hydroxymethyluridine
  misc_difference 4853: note = n indicates uridine, 5-methyluridine, or 5-hydroxymethyluridine
  misc_difference 4864: note = n indicates uridine, 5-methyluridine, or 5-hydroxymethyluridine
  misc_difference 4873: note = n indicates uridine, 5-methyluridine, or 5-hydroxymethyluridine
  misc_difference 4881: note = n indicates uridine, 5-methyluridine, or 5-hydroxymethyluridine
  misc_difference 4886: note = n indicates uridine, 5-methyluridine, or 5-hydroxymethyluridine
  misc_difference 4897: note = n indicates uridine, 5-methyluridine, or 5-hydroxymethyluridine
  misc_difference 4898: note = n indicates uridine, 5-methyluridine, or 5-hydroxymethyluridine
  misc_difference 4901: note = n indicates uridine, 5-methyluridine, or 5-hydroxymethyluridine
  misc_difference 4903: note = n indicates uridine, 5-methyluridine, or 5-hydroxymethyluridine
  misc_difference 4905: note = n indicates uridine, 5-methyluridine, or 5-hydroxymethyluridine
  misc_difference 4908: note = n indicates uridine, 5-methyluridine, or 5-hydroxymethyluridine
  misc_difference 4911: note = n indicates uridine, 5-methyluridine, or 5-hydroxymethyluridine
  misc_difference 4914: note = n indicates uridine, 5-methyluridine, or 5-hydroxymethyluridine
  misc_difference 4915: note = n indicates uridine, 5-methyluridine, or 5-hydroxymethyluridine
  misc_difference 4916: note = n indicates uridine, 5-methyluridine, or 5-hydroxymethyluridine
  misc_difference 4920: note = n indicates uridine, 5-methyluridine, or 5-hydroxymethyluridine
  misc_difference 4921: note = n indicates uridine, 5-methyluridine, or 5-hydroxymethyluridine
  misc_difference 4929: note = n indicates uridine, 5-methyluridine, or 5-hydroxymethyluridine
  misc_difference 4931: note = n indicates uridine, 5-methyluridine, or 5-hydroxymethyluridine
  misc_difference 4936: note = n indicates uridine, 5-methyluridine, or 5-hydroxymethyluridine
  misc_difference 4940: note = n indicates uridine, 5-methyluridine, or 5-hydroxymethyluridine
  misc_difference 4943: note = n indicates uridine, 5-methyluridine, or 5-hydroxymethyluridine
  misc_difference 4945: note = n indicates uridine, 5-methyluridine, or 5-hydroxymethyluridine
  misc_difference 4954: note = n indicates uridine, 5-methyluridine, or 5-hydroxymethyluridine
  misc_difference 4959: note = n indicates uridine, 5-methyluridine, or 5-hydroxymethyluridine
  misc_difference 4962: note = n indicates uridine, 5-methyluridine, or 5-hydroxymethyluridine
  misc_difference 4970: note = n indicates uridine, 5-methyluridine, or 5-hydroxymethyluridine
  misc_difference 4972: note = n indicates uridine, 5-methyluridine, or 5-hydroxymethyluridine
  misc_difference 4974: note = n indicates uridine, 5-methyluridine, or 5-hydroxymethyluridine
  misc_difference 4975: note = n indicates uridine, 5-methyluridine, or 5-hydroxymethyluridine
  misc_difference 4977: note = n indicates uridine, 5-methyluridine, or 5-hydroxymethyluridine
  misc_difference 4978: note = n indicates uridine, 5-methyluridine, or 5-hydroxymethyluridine
  misc_difference 4980: note = n indicates uridine, 5-methyluridine, or 5-hydroxymethyluridine
  misc_difference 4990: note = n indicates uridine, 5-methyluridine, or 5-hydroxymethyluridine
  misc_difference 4994: note = n indicates uridine, 5-methyluridine, or 5-hydroxymethyluridine
  misc_difference 4998: note = n indicates uridine, 5-methyluridine, or 5-hydroxymethyluridine
  misc_difference 5000: note = n indicates uridine, 5-methyluridine, or 5-hydroxymethyluridine
  misc_difference 5002: note = n indicates uridine, 5-methyluridine, or 5-hydroxymethyluridine
  misc_difference 5003: note = n indicates uridine, 5-methyluridine, or 5-hydroxymethyluridine
  misc_difference 5006: note = n indicates uridine, 5-methyluridine, or 5-hydroxymethyluridine
  misc_difference 5016: note = n indicates uridine, 5-methyluridine, or 5-hydroxymethyluridine
  misc_difference 5018: note = n indicates uridine, 5-methyluridine, or 5-hydroxymethyluridine
  misc_difference 5020: note = n indicates uridine, 5-methyluridine, or 5-hydroxymethyluridine
  misc_difference 5023: note = n indicates uridine, 5-methyluridine, or 5-hydroxymethyluridine
  misc_difference 5038: note = n indicates uridine, 5-methyluridine, or 5-hydroxymethyluridine
  misc_difference 5048: note = n indicates uridine, 5-methyluridine, or 5-hydroxymethyluridine
  misc_difference 5058: note = n indicates uridine, 5-methyluridine, or 5-hydroxymethyluridine
  misc_difference 5073: note = n indicates uridine, 5-methyluridine, or 5-hydroxymethyluridine
  misc_difference 5090: note = n indicates uridine, 5-methyluridine, or 5-hydroxymethyluridine
  misc_difference 5104: note = n indicates uridine, 5-methyluridine, or 5-hydroxymethyluridine
  misc_difference 5105: note = n indicates uridine, 5-methyluridine, or 5-hydroxymethyluridine
  misc_difference 5107: note = n indicates uridine, 5-methyluridine, or 5-hydroxymethyluridine
  misc_difference 5117: note = n indicates uridine, 5-methyluridine, or 5-hydroxymethyluridine
  misc_difference 5129: note = n indicates uridine, 5-methyluridine, or 5-hydroxymethyluridine
  misc_difference 5138: note = n indicates uridine, 5-methyluridine, or 5-hydroxymethyluridine
  misc_difference 5146: note = n indicates uridine, 5-methyluridine, or 5-hydroxymethyluridine
  misc_difference 5149: note = n indicates uridine, 5-methyluridine, or 5-hydroxymethyluridine
  misc_difference 5152: note = n indicates uridine, 5-methyluridine, or 5-hydroxymethyluridine
  misc_difference 5171: note = n indicates uridine, 5-methyluridine, or 5-hydroxymethyluridine
  misc_difference 5176: note = n indicates uridine, 5-methyluridine, or 5-hydroxymethyluridine
  misc_difference 5180: note = n indicates uridine, 5-methyluridine, or 5-hydroxymethyluridine
  misc_difference 5181: note = n indicates uridine, 5-methyluridine, or 5-hydroxymethyluridine
  misc_difference 5182: note = n indicates uridine, 5-methyluridine, or 5-hydroxymethyluridine
  misc_difference 5185: note = n indicates uridine, 5-methyluridine, or 5-hydroxymethyluridine
  misc_difference 5187: note = n indicates uridine, 5-methyluridine, or 5-hydroxymethyluridine
  misc_difference 5192: note = n indicates uridine, 5-methyluridine, or 5-hydroxymethyluridine
  misc_difference 5209: note = n indicates uridine, 5-methyluridine, or 5-hydroxymethyluridine
  misc_difference 5212: note = n indicates uridine, 5-methyluridine, or 5-hydroxymethyluridine
  misc_difference 5218: note = n indicates uridine, 5-methyluridine, or 5-hydroxymethyluridine
  misc_difference 5230: note = n indicates uridine, 5-methyluridine, or 5-hydroxymethyluridine
  misc_difference 5231: note = n indicates uridine, 5-methyluridine, or 5-hydroxymethyluridine
  misc_difference 5244: note = n indicates uridine, 5-methyluridine, or 5-hydroxymethyluridine
  misc_difference 5246: note = n indicates uridine, 5-methyluridine, or 5-hydroxymethyluridine
  misc_difference 5248: note = n indicates uridine, 5-methyluridine, or 5-hydroxymethyluridine
  misc_difference 5250: note = n indicates uridine, 5-methyluridine, or 5-hydroxymethyluridine
  misc_difference 5252: note = n indicates uridine, 5-methyluridine, or 5-hydroxymethyluridine
  misc_difference 5256: note = n indicates uridine, 5-methyluridine, or 5-hydroxymethyluridine
  misc_difference 5259: note = n indicates uridine, 5-methyluridine, or 5-hydroxymethyluridine
  misc_difference 5262: note = n indicates uridine, 5-methyluridine, or 5-hydroxymethyluridine
  misc_difference 5265: note = n indicates uridine, 5-methyluridine, or 5-hydroxymethyluridine
  misc_difference 5269: note = n indicates uridine, 5-methyluridine, or 5-hydroxymethyluridine
  misc_difference 5270: note = n indicates uridine, 5-methyluridine, or 5-hydroxymethyluridine
  misc_difference 5273: note = n indicates uridine, 5-methyluridine, or 5-hydroxymethyluridine
  misc_difference 5276: note = n indicates uridine, 5-methyluridine, or 5-hydroxymethyluridine
  misc_difference 5280: note = n indicates uridine, 5-methyluridine, or 5-hydroxymethyluridine
  misc_difference 5286: note = n indicates uridine, 5-methyluridine, or 5-hydroxymethyluridine
  misc_difference 5287: note = n indicates uridine, 5-methyluridine, or 5-hydroxymethyluridine
  misc_difference 5288: note = n indicates uridine, 5-methyluridine, or 5-hydroxymethyluridine
  misc_difference 5291: note = n indicates uridine, 5-methyluridine, or 5-hydroxymethyluridine
  misc_difference 5293: note = n indicates uridine, 5-methyluridine, or 5-hydroxymethyluridine
  misc_difference 5300: note = n indicates uridine, 5-methyluridine, or 5-hydroxymethyluridine
  misc_difference 5301: note = n indicates uridine, 5-methyluridine, or 5-hydroxymethyluridine
  misc_difference 5302: note = n indicates uridine, 5-methyluridine, or 5-hydroxymethyluridine
  misc_difference 5304: note = n indicates uridine, 5-methyluridine, or 5-hydroxymethyluridine
  misc_difference 5308: note = n indicates uridine, 5-methyluridine, or 5-hydroxymethyluridine
  misc_difference 5311: note = n indicates uridine, 5-methyluridine, or 5-hydroxymethyluridine
  misc_difference 5312: note = n indicates uridine, 5-methyluridine, or 5-hydroxymethyluridine
  misc_difference 5320: note = n indicates uridine, 5-methyluridine, or 5-hydroxymethyluridine
  misc_difference 5330: note = n indicates uridine, 5-methyluridine, or 5-hydroxymethyluridine
  misc_difference 5335: note = n indicates uridine, 5-methyluridine, or 5-hydroxymethyluridine
  misc_difference 5352: note = n indicates uridine, 5-methyluridine, or 5-hydroxymethyluridine
  misc_difference 5363: note = n indicates uridine, 5-methyluridine, or 5-hydroxymethyluridine
  misc_difference 5367: note = n indicates uridine, 5-methyluridine, or 5-hydroxymethyluridine
  misc_difference 5369: note = n indicates uridine, 5-methyluridine, or 5-hydroxymethyluridine
  misc_difference 5370: note = n indicates uridine, 5-methyluridine, or 5-hydroxymethyluridine
  misc_difference 5373: note = n indicates uridine, 5-methyluridine, or 5-hydroxymethyluridine
  misc_difference 5374: note = n indicates uridine, 5-methyluridine, or 5-hydroxymethyluridine
  misc_difference 5384: note = n indicates uridine, 5-methyluridine, or 5-hydroxymethyluridine
  misc_difference 5386: note = n indicates uridine, 5-methyluridine, or 5-hydroxymethyluridine
  misc_difference 5391: note = n indicates uridine, 5-methyluridine, or 5-hydroxymethyluridine
  misc_difference 5392: note = n indicates uridine, 5-methyluridine, or 5-hydroxymethyluridine
  misc_difference 5393: note = n indicates uridine, 5-methyluridine, or 5-hydroxymethyluridine
  misc_difference 5395: note = n indicates uridine, 5-methyluridine, or 5-hydroxymethyluridine
  misc_difference 5407: note = n indicates uridine, 5-methyluridine, or 5-hydroxymethyluridine
  misc_difference 5411: note = n indicates uridine, 5-methyluridine, or 5-hydroxymethyluridine
  misc_difference 5417: note = n indicates uridine, 5-methyluridine, or 5-hydroxymethyluridine
  misc_difference 5425: note = n indicates uridine, 5-methyluridine, or 5-hydroxymethyluridine
  misc_difference 5427: note = n indicates uridine, 5-methyluridine, or 5-hydroxymethyluridine
  misc_difference 5428: note = n indicates uridine, 5-methyluridine, or 5-hydroxymethyluridine
  misc_difference 5438: note = n indicates uridine, 5-methyluridine, or 5-hydroxymethyluridine
  misc_difference 5444: note = n indicates uridine, 5-methyluridine, or 5-hydroxymethyluridine
  misc_difference 5450: note = n indicates uridine, 5-methyluridine, or 5-hydroxymethyluridine
  misc_difference 5469: note = n indicates uridine, 5-methyluridine, or 5-hydroxymethyluridine
  misc_difference 5473: note = n indicates uridine, 5-methyluridine, or 5-hydroxymethyluridine
  misc_difference 5474: note = n indicates uridine, 5-methyluridine, or 5-hydroxymethyluridine
  misc_difference 5490: note = n indicates uridine, 5-methyluridine, or 5-hydroxymethyluridine
  misc_difference 5493: note = n indicates uridine, 5-methyluridine, or 5-hydroxymethyluridine
  misc_difference 5506: note = n indicates uridine, 5-methyluridine, or 5-hydroxymethyluridine
  misc_difference 5509: note = n indicates uridine, 5-methyluridine, or 5-hydroxymethyluridine
  misc_difference 5510: note = n indicates uridine, 5-methyluridine, or 5-hydroxymethyluridine
  misc_difference 5511: note = n indicates uridine, 5-methyluridine, or 5-hydroxymethyluridine
  misc_difference 5527: note = n indicates uridine, 5-methyluridine, or 5-hydroxymethyluridine
  misc_difference 5531: note = n indicates uridine, 5-methyluridine, or 5-hydroxymethyluridine
  misc_difference 5536: note = n indicates uridine, 5-methyluridine, or 5-hydroxymethyluridine
  misc_difference 5539: note = n indicates uridine, 5-methyluridine, or 5-hydroxymethyluridine
  misc_difference 5543: note = n indicates uridine, 5-methyluridine, or 5-hydroxymethyluridine
  misc_difference 5554: note = n indicates uridine, 5-methyluridine, or 5-hydroxymethyluridine
  misc_difference 5563: note = n indicates uridine, 5-methyluridine, or 5-hydroxymethyluridine
  misc_difference 5564: note = n indicates uridine, 5-methyluridine, or 5-hydroxymethyluridine
  misc_difference 5571: note = n indicates uridine, 5-methyluridine, or 5-hydroxymethyluridine
  misc_difference 5579: note = n indicates uridine, 5-methyluridine, or 5-hydroxymethyluridine
  misc_difference 5582: note = n indicates uridine, 5-methyluridine, or 5-hydroxymethyluridine
  misc_difference 5589: note = n indicates uridine, 5-methyluridine, or 5-hydroxymethyluridine
  misc_difference 5593: note = n indicates uridine, 5-methyluridine, or 5-hydroxymethyluridine
  misc_difference 5595: note = n indicates uridine, 5-methyluridine, or 5-hydroxymethyluridine
  misc_difference 5608: note = n indicates uridine, 5-methyluridine, or 5-hydroxymethyluridine
  misc_difference 5611: note = n indicates uridine, 5-methyluridine, or 5-hydroxymethyluridine
  misc_difference 5613: note = n indicates uridine, 5-methyluridine, or 5-hydroxymethyluridine
  misc_difference 5629: note = n indicates uridine, 5-methyluridine, or 5-hydroxymethyluridine
  misc_difference 5633: note = n indicates uridine, 5-methyluridine, or 5-hydroxymethyluridine
  misc_difference 5638: note = n indicates uridine, 5-methyluridine, or 5-hydroxymethyluridine
  misc_difference 5641: note = n indicates uridine, 5-methyluridine, or 5-hydroxymethyluridine
  misc_difference 5642: note = n indicates uridine, 5-methyluridine, or 5-hydroxymethyluridine
  misc_difference 5655: note = n indicates uridine, 5-methyluridine, or 5-hydroxymethyluridine
  misc_difference 5656: note = n indicates uridine, 5-methyluridine, or 5-hydroxymethyluridine
  misc_difference 5657: note = n indicates uridine, 5-methyluridine, or 5-hydroxymethyluridine
  misc_difference 5664: note = n indicates uridine, 5-methyluridine, or 5-hydroxymethyluridine
  misc_difference 5665: note = n indicates uridine, 5-methyluridine, or 5-hydroxymethyluridine
  misc_difference 5668: note = n indicates uridine, 5-methyluridine, or 5-hydroxymethyluridine
  misc_difference 5682: note = n indicates uridine, 5-methyluridine, or 5-hydroxymethyluridine
  misc_difference 5688: note = n indicates uridine, 5-methyluridine, or 5-hydroxymethyluridine
  misc_difference 5689: note = n indicates uridine, 5-methyluridine, or 5-hydroxymethyluridine
  misc_difference 5690: note = n indicates uridine, 5-methyluridine, or 5-hydroxymethyluridine
  misc_difference 5693: note = n indicates uridine, 5-methyluridine, or 5-hydroxymethyluridine
  misc_difference 5699: note = n indicates uridine, 5-methyluridine, or 5-hydroxymethyluridine
  misc_difference 5703: note = n indicates uridine, 5-methyluridine, or 5-hydroxymethyluridine
  misc_difference 5707: note = n indicates uridine, 5-methyluridine, or 5-hydroxymethyluridine
  misc_difference 5709: note = n indicates uridine, 5-methyluridine, or 5-hydroxymethyluridine
  misc_difference 5710: note = n indicates uridine, 5-methyluridine, or 5-hydroxymethyluridine
  misc_difference 5711: note = n indicates uridine, 5-methyluridine, or 5-hydroxymethyluridine
  misc_difference 5712: note = n indicates uridine, 5-methyluridine, or 5-hydroxymethyluridine
  misc_difference 5715: note = n indicates uridine, 5-methyluridine, or 5-hydroxymethyluridine
  misc_difference 5726: note = n indicates uridine, 5-methyluridine, or 5-hydroxymethyluridine
  misc_difference 5735: note = n indicates uridine, 5-methyluridine, or 5-hydroxymethyluridine
  misc_difference 5736: note = n indicates uridine, 5-methyluridine, or 5-hydroxymethyluridine
  misc_difference 5737: note = n indicates uridine, 5-methyluridine, or 5-hydroxymethyluridine
  misc_difference 5748: note = n indicates uridine, 5-methyluridine, or 5-hydroxymethyluridine
  misc_difference 5752: note = n indicates uridine, 5-methyluridine, or 5-hydroxymethyluridine
  misc_difference 5764: note = n indicates uridine, 5-methyluridine, or 5-hydroxymethyluridine
  misc_difference 5767: note = n indicates uridine, 5-methyluridine, or 5-hydroxymethyluridine
  misc_difference 5769: note = n indicates uridine, 5-methyluridine, or 5-hydroxymethyluridine
  misc_difference 5776: note = n indicates uridine, 5-methyluridine, or 5-hydroxymethyluridine
  misc_difference 5779: note = n indicates uridine, 5-methyluridine, or 5-hydroxymethyluridine
  misc_difference 5781: note = n indicates uridine, 5-methyluridine, or 5-hydroxymethyluridine
  misc_difference 5782: note = n indicates uridine, 5-methyluridine, or 5-hydroxymethyluridine
  misc_difference 5796: note = n indicates uridine, 5-methyluridine, or 5-hydroxymethyluridine
  misc_difference 5797: note = n indicates uridine, 5-methyluridine, or 5-hydroxymethyluridine
  misc_difference 5803: note = n indicates uridine, 5-methyluridine, or 5-hydroxymethyluridine
  misc_difference 5804: note = n indicates uridine, 5-methyluridine, or 5-hydroxymethyluridine
  misc_difference 5805: note = n indicates uridine, 5-methyluridine, or 5-hydroxymethyluridine
  misc_difference 5808: note = n indicates uridine, 5-methyluridine, or 5-hydroxymethyluridine
  misc_difference 5810: note = n indicates uridine, 5-methyluridine, or 5-hydroxymethyluridine
  misc_difference 5821: note = n indicates uridine, 5-methyluridine, or 5-hydroxymethyluridine
  misc_difference 5841: note = n indicates uridine, 5-methyluridine, or 5-hydroxymethyluridine
  misc_difference 5842: note = n indicates uridine, 5-methyluridine, or 5-hydroxymethyluridine
  misc_difference 5845: note = n indicates uridine, 5-methyluridine, or 5-hydroxymethyluridine
  misc_difference 5856: note = n indicates uridine, 5-methyluridine, or 5-hydroxymethyluridine
  misc_difference 5857: note = n indicates uridine, 5-methyluridine, or 5-hydroxymethyluridine
  misc_difference 5862: note = n indicates uridine, 5-methyluridine, or 5-hydroxymethyluridine
  misc_difference 5863: note = n indicates uridine, 5-methyluridine, or 5-hydroxymethyluridine
  misc_difference 5867: note = n indicates uridine, 5-methyluridine, or 5-hydroxymethyluridine
  misc_difference 5876: note = n indicates uridine, 5-methyluridine, or 5-hydroxymethyluridine
  misc_difference 5879: note = n indicates uridine, 5-methyluridine, or 5-hydroxymethyluridine
  misc_difference 5892: note = n indicates uridine, 5-methyluridine, or 5-hydroxymethyluridine
  misc_difference 5898: note = n indicates uridine, 5-methyluridine, or 5-hydroxymethyluridine
  misc_difference 5908: note = n indicates uridine, 5-methyluridine, or 5-hydroxymethyluridine
  misc_difference 5917: note = n indicates uridine, 5-methyluridine, or 5-hydroxymethyluridine
  misc_difference 5926: note = n indicates uridine, 5-methyluridine, or 5-hydroxymethyluridine
  misc_difference 5933: note = n indicates uridine, 5-methyluridine, or 5-hydroxymethyluridine
  misc_difference 5939: note = n indicates uridine, 5-methyluridine, or 5-hydroxymethyluridine
  misc_difference 5941: note = n indicates uridine, 5-methyluridine, or 5-hydroxymethyluridine
  misc_difference 5942: note = n indicates uridine, 5-methyluridine, or 5-hydroxymethyluridine
  misc_difference 5944: note = n indicates uridine, 5-methyluridine, or 5-hydroxymethyluridine
  misc_difference 5953: note = n indicates uridine, 5-methyluridine, or 5-hydroxymethyluridine
  misc_difference 5960: note = n indicates uridine, 5-methyluridine, or 5-hydroxymethyluridine
  misc_difference 5961: note = n indicates uridine, 5-methyluridine, or 5-hydroxymethyluridine
  misc_difference 5963: note = n indicates uridine, 5-methyluridine, or 5-hydroxymethyluridine
  misc_difference 5964: note = n indicates uridine, 5-methyluridine, or 5-hydroxymethyluridine
  misc_difference 5965: note = n indicates uridine, 5-methyluridine, or 5-hydroxymethyluridine
  misc_difference 5983: note = n indicates uridine, 5-methyluridine, or 5-hydroxymethyluridine
  misc_difference 5988: note = n indicates uridine, 5-methyluridine, or 5-hydroxymethyluridine
  misc_difference 5991: note = n indicates uridine, 5-methyluridine, or 5-hydroxymethyluridine
  misc_difference 6001: note = n indicates uridine, 5-methyluridine, or 5-hydroxymethyluridine
  misc_difference 6005: note = n indicates uridine, 5-methyluridine, or 5-hydroxymethyluridine
  misc_difference 6008: note = n indicates uridine, 5-methyluridine, or 5-hydroxymethyluridine
  misc_difference 6010: note = n indicates uridine, 5-methyluridine, or 5-hydroxymethyluridine
  misc_difference 6011: note = n indicates uridine, 5-methyluridine, or 5-hydroxymethyluridine
  misc_difference 6014: note = n indicates uridine, 5-methyluridine, or 5-hydroxymethyluridine
  misc_difference 6015: note = n indicates uridine, 5-methyluridine, or 5-hydroxymethyluridine
  misc_difference 6016: note = n indicates uridine, 5-methyluridine, or 5-hydroxymethyluridine
  misc_difference 6018: note = n indicates uridine, 5-methyluridine, or 5-hydroxymethyluridine
  misc_difference 6020: note = n indicates uridine, 5-methyluridine, or 5-hydroxymethyluridine
  misc_difference 6021: note = n indicates uridine, 5-methyluridine, or 5-hydroxymethyluridine
  misc_difference 6024: note = n indicates uridine, 5-methyluridine, or 5-hydroxymethyluridine
  misc_difference 6026: note = n indicates uridine, 5-methyluridine, or 5-hydroxymethyluridine
  misc_difference 6029: note = n indicates uridine, 5-methyluridine, or 5-hydroxymethyluridine
  misc_difference 6031: note = n indicates uridine, 5-methyluridine, or 5-hydroxymethyluridine
  misc_difference 6038: note = n indicates uridine, 5-methyluridine, or 5-hydroxymethyluridine
  misc_difference 6042: note = n indicates uridine, 5-methyluridine, or 5-hydroxymethyluridine
  misc_difference 6043: note = n indicates uridine, 5-methyluridine, or 5-hydroxymethyluridine
  misc_difference 6044: note = n indicates uridine, 5-methyluridine, or 5-hydroxymethyluridine
  misc_difference 6045: note = n indicates uridine, 5-methyluridine, or 5-hydroxymethyluridine
  misc_difference 6058: note = n indicates uridine, 5-methyluridine, or 5-hydroxymethyluridine
  misc_difference 6064: note = n indicates uridine, 5-methyluridine, or 5-hydroxymethyluridine
  misc_difference 6072: note = n indicates uridine, 5-methyluridine, or 5-hydroxymethyluridine
  misc_difference 6074: note = n indicates uridine, 5-methyluridine, or 5-hydroxymethyluridine
  misc_difference 6082: note = n indicates uridine, 5-methyluridine, or 5-hydroxymethyluridine
  misc_difference 6084: note = n indicates uridine, 5-methyluridine, or 5-hydroxymethyluridine
  misc_difference 6085: note = n indicates uridine, 5-methyluridine, or 5-hydroxymethyluridine
  misc_difference 6096: note = n indicates uridine, 5-methyluridine, or 5-hydroxymethyluridine
  misc_difference 6097: note = n indicates uridine, 5-methyluridine, or 5-hydroxymethyluridine
  misc_difference 6098: note = n indicates uridine, 5-methyluridine, or 5-hydroxymethyluridine
  misc_difference 6104: note = n indicates uridine, 5-methyluridine, or 5-hydroxymethyluridine
  misc_difference 6106: note = n indicates uridine, 5-methyluridine, or 5-hydroxymethyluridine
  misc_difference 6110: note = n indicates uridine, 5-methyluridine, or 5-hydroxymethyluridine
  misc_difference 6111: note = n indicates uridine, 5-methyluridine, or 5-hydroxymethyluridine
  misc_difference 6113: note = n indicates uridine, 5-methyluridine, or 5-hydroxymethyluridine
  misc_difference 6114: note = n indicates uridine, 5-methyluridine, or 5-hydroxymethyluridine
  misc_difference 6117: note = n indicates uridine, 5-methyluridine, or 5-hydroxymethyluridine
  misc_difference 6119: note = n indicates uridine, 5-methyluridine, or 5-hydroxymethyluridine
  misc_difference 6121: note = n indicates uridine, 5-methyluridine, or 5-hydroxymethyluridine
  misc_difference 6122: note = n indicates uridine, 5-methyluridine, or 5-hydroxymethyluridine
  misc_difference 6124: note = n indicates uridine, 5-methyluridine, or 5-hydroxymethyluridine
  misc_difference 6125: note = n indicates uridine, 5-methyluridine, or 5-hydroxymethyluridine
  misc_difference 6132: note = n indicates uridine, 5-methyluridine, or 5-hydroxymethyluridine
  misc_difference 6137: note = n indicates uridine, 5-methyluridine, or 5-hydroxymethyluridine
  misc_difference 6141: note = n indicates uridine, 5-methyluridine, or 5-hydroxymethyluridine
  misc_difference 6143: note = n indicates uridine, 5-methyluridine, or 5-hydroxymethyluridine
  misc_difference 6144: note = n indicates uridine, 5-methyluridine, or 5-hydroxymethyluridine
  misc_difference 6145: note = n indicates uridine, 5-methyluridine, or 5-hydroxymethyluridine
  misc_difference 6151: note = n indicates uridine, 5-methyluridine, or 5-hydroxymethyluridine
  misc_difference 6154: note = n indicates uridine, 5-methyluridine, or 5-hydroxymethyluridine
  misc_difference 6155: note = n indicates uridine, 5-methyluridine, or 5-hydroxymethyluridine
  misc_difference 6164: note = n indicates uridine, 5-methyluridine, or 5-hydroxymethyluridine
  misc_difference 6165: note = n indicates uridine, 5-methyluridine, or 5-hydroxymethyluridine
  misc_difference 6168: note = n indicates uridine, 5-methyluridine, or 5-hydroxymethyluridine
  misc_difference 6171: note = n indicates uridine, 5-methyluridine, or 5-hydroxymethyluridine
  misc_difference 6174: note = n indicates uridine, 5-methyluridine, or 5-hydroxymethyluridine
  misc_difference 6175: note = n indicates uridine, 5-methyluridine, or 5-hydroxymethyluridine
  misc_difference 6182: note = n indicates uridine, 5-methyluridine, or 5-hydroxymethyluridine
  misc_difference 6188: note = n indicates uridine, 5-methyluridine, or 5-hydroxymethyluridine
  misc_difference 6189: note = n indicates uridine, 5-methyluridine, or 5-hydroxymethyluridine
  misc_difference 6190: note = n indicates uridine, 5-methyluridine, or 5-hydroxymethyluridine
  misc_difference 6191: note = n indicates uridine, 5-methyluridine, or 5-hydroxymethyluridine
  misc_difference 6192: note = n indicates uridine, 5-methyluridine, or 5-hydroxymethyluridine
  misc_difference 6197: note = n indicates uridine, 5-methyluridine, or 5-hydroxymethyluridine
  misc_difference 6205: note = n indicates uridine, 5-methyluridine, or 5-hydroxymethyluridine
  misc_difference 6213: note = n indicates uridine, 5-methyluridine, or 5-hydroxymethyluridine
  misc_difference 6214: note = n indicates uridine, 5-methyluridine, or 5-hydroxymethyluridine
  misc_difference 6215: note = n indicates uridine, 5-methyluridine, or 5-hydroxymethyluridine
  misc_difference 6228: note = n indicates uridine, 5-methyluridine, or 5-hydroxymethyluridine
  misc_difference 6231: note = n indicates uridine, 5-methyluridine, or 5-hydroxymethyluridine
  misc_difference 6233: note = n indicates uridine, 5-methyluridine, or 5-hydroxymethyluridine
  misc_difference 6234: note = n indicates uridine, 5-methyluridine, or 5-hydroxymethyluridine
  misc_difference 6235: note = n indicates uridine, 5-methyluridine, or 5-hydroxymethyluridine
  misc_difference 6247: note = n indicates uridine, 5-methyluridine, or 5-hydroxymethyluridine
  misc_difference 6252: note = n indicates uridine, 5-methyluridine, or 5-hydroxymethyluridine
  misc_difference 6259: note = n indicates uridine, 5-methyluridine, or 5-hydroxymethyluridine
  misc_difference 6263: note = n indicates uridine, 5-methyluridine, or 5-hydroxymethyluridine
  misc_difference 6264: note = n indicates uridine, 5-methyluridine, or 5-hydroxymethyluridine
  misc_difference 6271: note = n indicates uridine, 5-methyluridine, or 5-hydroxymethyluridine
  misc_difference 6283: note = n indicates uridine, 5-methyluridine, or 5-hydroxymethyluridine
  misc_difference 6292: note = n indicates uridine, 5-methyluridine, or 5-hydroxymethyluridine
  misc_difference 6295: note = n indicates uridine, 5-methyluridine, or 5-hydroxymethyluridine
  misc_difference 6302: note = n indicates uridine, 5-methyluridine, or 5-hydroxymethyluridine
  misc_difference 6317: note = n indicates uridine, 5-methyluridine, or 5-hydroxymethyluridine
  misc_difference 6318: note = n indicates uridine, 5-methyluridine, or 5-hydroxymethyluridine
  misc_difference 6323: note = n indicates uridine, 5-methyluridine, or 5-hydroxymethyluridine
  misc_difference 6325: note = n indicates uridine, 5-methyluridine, or 5-hydroxymethyluridine
  misc_difference 6334: note = n indicates uridine, 5-methyluridine, or 5-hydroxymethyluridine
  misc_difference 6342: note = n indicates uridine, 5-methyluridine, or 5-hydroxymethyluridine
  misc_difference 6343: note = n indicates uridine, 5-methyluridine, or 5-hydroxymethyluridine
  misc_difference 6349: note = n indicates uridine, 5-methyluridine, or 5-hydroxymethyluridine
  misc_difference 6351: note = n indicates uridine, 5-methyluridine, or 5-hydroxymethyluridine
  misc_difference 6352: note = n indicates uridine, 5-methyluridine, or 5-hydroxymethyluridine
  misc_difference 6356: note = n indicates uridine, 5-methyluridine, or 5-hydroxymethyluridine
  misc_difference 6357: note = n indicates uridine, 5-methyluridine, or 5-hydroxymethyluridine
  misc_difference 6366: note = n indicates uridine, 5-methyluridine, or 5-hydroxymethyluridine
  misc_difference 6367: note = n indicates uridine, 5-methyluridine, or 5-hydroxymethyluridine
  misc_difference 6368: note = n indicates uridine, 5-methyluridine, or 5-hydroxymethyluridine
  misc_difference 6371: note = n indicates uridine, 5-methyluridine, or 5-hydroxymethyluridine
  misc_difference 6373: note = n indicates uridine, 5-methyluridine, or 5-hydroxymethyluridine
  misc_difference 6378: note = n indicates uridine, 5-methyluridine, or 5-hydroxymethyluridine
  misc_difference 6381: note = n indicates uridine, 5-methyluridine, or 5-hydroxymethyluridine
  misc_difference 6382: note = n indicates uridine, 5-methyluridine, or 5-hydroxymethyluridine
  misc_difference 6390: note = n indicates uridine, 5-methyluridine, or 5-hydroxymethyluridine
  misc_difference 6392: note = n indicates uridine, 5-methyluridine, or 5-hydroxymethyluridine
  misc_difference 6396: note = n indicates uridine, 5-methyluridine, or 5-hydroxymethyluridine
  misc_difference 6398: note = n indicates uridine, 5-methyluridine, or 5-hydroxymethyluridine
  misc_difference 6401: note = n indicates uridine, 5-methyluridine, or 5-hydroxymethyluridine
  misc_difference 6404: note = n indicates uridine, 5-methyluridine, or 5-hydroxymethyluridine
  misc_difference 6408: note = n indicates uridine, 5-methyluridine, or 5-hydroxymethyluridine
  misc_difference 6410: note = n indicates uridine, 5-methyluridine, or 5-hydroxymethyluridine
  misc_difference 6411: note = n indicates uridine, 5-methyluridine, or 5-hydroxymethyluridine
  misc_difference 6420: note = n indicates uridine, 5-methyluridine, or 5-hydroxymethyluridine
  misc_difference 6421: note = n indicates uridine, 5-methyluridine, or 5-hydroxymethyluridine
  misc_difference 6422: note = n indicates uridine, 5-methyluridine, or 5-hydroxymethyluridine
  misc_difference 6436: note = n indicates uridine, 5-methyluridine, or 5-hydroxymethyluridine
  misc_difference 6442: note = n indicates uridine, 5-methyluridine, or 5-hydroxymethyluridine
  misc_difference 6443: note = n indicates uridine, 5-methyluridine, or 5-hydroxymethyluridine
  misc_difference 6446: note = n indicates uridine, 5-methyluridine, or 5-hydroxymethyluridine
  misc_difference 6457: note = n indicates uridine, 5-methyluridine, or 5-hydroxymethyluridine
  misc_difference 6460: note = n indicates uridine, 5-methyluridine, or 5-hydroxymethyluridine
  misc_difference 6464: note = n indicates uridine, 5-methyluridine, or 5-hydroxymethyluridine
  misc_difference 6465: note = n indicates uridine, 5-methyluridine, or 5-hydroxymethyluridine
  misc_difference 6469: note = n indicates uridine, 5-methyluridine, or 5-hydroxymethyluridine
  misc_difference 6470: note = n indicates uridine, 5-methyluridine, or 5-hydroxymethyluridine
  misc_difference 6477: note = n indicates uridine, 5-methyluridine, or 5-hydroxymethyluridine
  misc_difference 6478: note = n indicates uridine, 5-methyluridine, or 5-hydroxymethyluridine
  misc_difference 6494: note = n indicates uridine, 5-methyluridine, or 5-hydroxymethyluridine
  misc_difference 6497: note = n indicates uridine, 5-methyluridine, or 5-hydroxymethyluridine
  misc_difference 6500: note = n indicates uridine, 5-methyluridine, or 5-hydroxymethyluridine
  misc_difference 6502: note = n indicates uridine, 5-methyluridine, or 5-hydroxymethyluridine
  misc_difference 6503: note = n indicates uridine, 5-methyluridine, or 5-hydroxymethyluridine
  misc_difference 6504: note = n indicates uridine, 5-methyluridine, or 5-hydroxymethyluridine
  misc_difference 6505: note = n indicates uridine, 5-methyluridine, or 5-hydroxymethyluridine
  misc_difference 6506: note = n indicates uridine, 5-methyluridine, or 5-hydroxymethyluridine
  misc_difference 6518: note = n indicates uridine, 5-methyluridine, or 5-hydroxymethyluridine
  misc_difference 6521: note = n indicates uridine, 5-methyluridine, or 5-hydroxymethyluridine
  misc_difference 6522: note = n indicates uridine, 5-methyluridine, or 5-hydroxymethyluridine
  misc_difference 6523: note = n indicates uridine, 5-methyluridine, or 5-hydroxymethyluridine
  misc_difference 6527: note = n indicates uridine, 5-methyluridine, or 5-hydroxymethyluridine
  misc_difference 6529: note = n indicates uridine, 5-methyluridine, or 5-hydroxymethyluridine
  misc_difference 6531: note = n indicates uridine, 5-methyluridine, or 5-hydroxymethyluridine
  misc_difference 6532: note = n indicates uridine, 5-methyluridine, or 5-hydroxymethyluridine
  misc_difference 6541: note = n indicates uridine, 5-methyluridine, or 5-hydroxymethyluridine
  misc_difference 6547: note = n indicates uridine, 5-methyluridine, or 5-hydroxymethyluridine
  misc_difference 6555: note = n indicates uridine, 5-methyluridine, or 5-hydroxymethyluridine
  misc_difference 6556: note = n indicates uridine, 5-methyluridine, or 5-hydroxymethyluridine
  misc_difference 6557: note = n indicates uridine, 5-methyluridine, or 5-hydroxymethyluridine
  misc_difference 6559: note = n indicates uridine, 5-methyluridine, or 5-hydroxymethyluridine
  misc_difference 6562: note = n indicates uridine, 5-methyluridine, or 5-hydroxymethyluridine
  misc_difference 6567: note = n indicates uridine, 5-methyluridine, or 5-hydroxymethyluridine
  misc_difference 6568: note = n indicates uridine, 5-methyluridine, or 5-hydroxymethyluridine
  misc_difference 6580: note = n indicates uridine, 5-methyluridine, or 5-hydroxymethyluridine
  misc_difference 6586: note = n indicates uridine, 5-methyluridine, or 5-hydroxymethyluridine
  misc_difference 6590: note = n indicates uridine, 5-methyluridine, or 5-hydroxymethyluridine
  misc_difference 6605: note = n indicates uridine, 5-methyluridine, or 5-hydroxymethyluridine
  misc_difference 6608: note = n indicates uridine, 5-methyluridine, or 5-hydroxymethyluridine
  misc_difference 6625: note = n indicates uridine, 5-methyluridine, or 5-hydroxymethyluridine
  misc_difference 6631: note = n indicates uridine, 5-methyluridine, or 5-hydroxymethyluridine
  misc_difference 6634: note = n indicates uridine, 5-methyluridine, or 5-hydroxymethyluridine
  misc_difference 6641: note = n indicates uridine, 5-methyluridine, or 5-hydroxymethyluridine
  misc_difference 6647: note = n indicates uridine, 5-methyluridine, or 5-hydroxymethyluridine
  misc_difference 6652: note = n indicates uridine, 5-methyluridine, or 5-hydroxymethyluridine
  misc_difference 6663: note = n indicates uridine, 5-methyluridine, or 5-hydroxymethyluridine
  misc_difference 6665: note = n indicates uridine, 5-methyluridine, or 5-hydroxymethyluridine
  misc_difference 6667: note = n indicates uridine, 5-methyluridine, or 5-hydroxymethyluridine
  misc_difference 6669: note = n indicates uridine, 5-methyluridine, or 5-hydroxymethyluridine
  misc_difference 6676: note = n indicates uridine, 5-methyluridine, or 5-hydroxymethyluridine
  misc_difference 6688: note = n indicates uridine, 5-methyluridine, or 5-hydroxymethyluridine
  misc_difference 6691: note = n indicates uridine, 5-methyluridine, or 5-hydroxymethyluridine
  misc_difference 6692: note = n indicates uridine, 5-methyluridine, or 5-hydroxymethyluridine
  misc_difference 6699: note = n indicates uridine, 5-methyluridine, or 5-hydroxymethyluridine
  misc_difference 6700: note = n indicates uridine, 5-methyluridine, or 5-hydroxymethyluridine
  misc_difference 6704: note = n indicates uridine, 5-methyluridine, or 5-hydroxymethyluridine
  misc_difference 6709: note = n indicates uridine, 5-methyluridine, or 5-hydroxymethyluridine
  misc_difference 6712: note = n indicates uridine, 5-methyluridine, or 5-hydroxymethyluridine
  misc_difference 6715: note = n indicates uridine, 5-methyluridine, or 5-hydroxymethyluridine
  misc_difference 6716: note = n indicates uridine, 5-methyluridine, or 5-hydroxymethyluridine
  misc_difference 6724: note = n indicates uridine, 5-methyluridine, or 5-hydroxymethyluridine
  misc_difference 6725: note = n indicates uridine, 5-methyluridine, or 5-hydroxymethyluridine
  misc_difference 6728: note = n indicates uridine, 5-methyluridine, or 5-hydroxymethyluridine
  misc_difference 6733: note = n indicates uridine, 5-methyluridine, or 5-hydroxymethyluridine
  misc_difference 6735: note = n indicates uridine, 5-methyluridine, or 5-hydroxymethyluridine
  misc_difference 6736: note = n indicates uridine, 5-methyluridine, or 5-hydroxymethyluridine
  misc_difference 6737: note = n indicates uridine, 5-methyluridine, or 5-hydroxymethyluridine
  misc_difference 6740: note = n indicates uridine, 5-methyluridine, or 5-hydroxymethyluridine
  misc_difference 6742: note = n indicates uridine, 5-methyluridine, or 5-hydroxymethyluridine
  misc_difference 6744: note = n indicates uridine, 5-methyluridine, or 5-hydroxymethyluridine
  misc_difference 6749: note = n indicates uridine, 5-methyluridine, or 5-hydroxymethyluridine
  misc_difference 6756: note = n indicates uridine, 5-methyluridine, or 5-hydroxymethyluridine
  misc_difference 6757: note = n indicates uridine, 5-methyluridine, or 5-hydroxymethyluridine
  misc_difference 6758: note = n indicates uridine, 5-methyluridine, or 5-hydroxymethyluridine
  misc_difference 6764: note = n indicates uridine, 5-methyluridine, or 5-hydroxymethyluridine
  misc_difference 6766: note = n indicates uridine, 5-methyluridine, or 5-hydroxymethyluridine
  misc_difference 6767: note = n indicates uridine, 5-methyluridine, or 5-hydroxymethyluridine
  misc_difference 6769: note = n indicates uridine, 5-methyluridine, or 5-hydroxymethyluridine
  misc_difference 6780: note = n indicates uridine, 5-methyluridine, or 5-hydroxymethyluridine
  misc_difference 6781: note = n indicates uridine, 5-methyluridine, or 5-hydroxymethyluridine
  misc_difference 6788: note = n indicates uridine, 5-methyluridine, or 5-hydroxymethyluridine
  misc_difference 6794: note = n indicates uridine, 5-methyluridine, or 5-hydroxymethyluridine
  misc_difference 6795: note = n indicates uridine, 5-methyluridine, or 5-hydroxymethyluridine
  misc_difference 6797: note = n indicates uridine, 5-methyluridine, or 5-hydroxymethyluridine
  misc_difference 6799: note = n indicates uridine, 5-methyluridine, or 5-hydroxymethyluridine
  misc_difference 6800: note = n indicates uridine, 5-methyluridine, or 5-hydroxymethyluridine
  misc_difference 6802: note = n indicates uridine, 5-methyluridine, or 5-hydroxymethyluridine
  misc_difference 6809: note = n indicates uridine, 5-methyluridine, or 5-hydroxymethyluridine
  misc_difference 6814: note = n indicates uridine, 5-methyluridine, or 5-hydroxymethyluridine
  misc_difference 6819: note = n indicates uridine, 5-methyluridine, or 5-hydroxymethyluridine
  misc_difference 6822: note = n indicates uridine, 5-methyluridine, or 5-hydroxymethyluridine
  misc_difference 6823: note = n indicates uridine, 5-methyluridine, or 5-hydroxymethyluridine
  misc_difference 6824: note = n indicates uridine, 5-methyluridine, or 5-hydroxymethyluridine
  misc_difference 6827: note = n indicates uridine, 5-methyluridine, or 5-hydroxymethyluridine
  misc_difference 6833: note = n indicates uridine, 5-methyluridine, or 5-hydroxymethyluridine
  misc_difference 6847: note = n indicates uridine, 5-methyluridine, or 5-hydroxymethyluridine
  misc_difference 6851: note = n indicates uridine, 5-methyluridine, or 5-hydroxymethyluridine
  misc_difference 6853: note = n indicates uridine, 5-methyluridine, or 5-hydroxymethyluridine
  misc_difference 6861: note = n indicates uridine, 5-methyluridine, or 5-hydroxymethyluridine
  misc_difference 6862: note = n indicates uridine, 5-methyluridine, or 5-hydroxymethyluridine
  misc_difference 6865: note = n indicates uridine, 5-methyluridine, or 5-hydroxymethyluridine
  misc_difference 6868: note = n indicates uridine, 5-methyluridine, or 5-hydroxymethyluridine
  misc_difference 6869: note = n indicates uridine, 5-methyluridine, or 5-hydroxymethyluridine
  misc_difference 6871: note = n indicates uridine, 5-methyluridine, or 5-hydroxymethyluridine
  misc_difference 6879: note = n indicates uridine, 5-methyluridine, or 5-hydroxymethyluridine
  misc_difference 6880: note = n indicates uridine, 5-methyluridine, or 5-hydroxymethyluridine
  misc_difference 6884: note = n indicates uridine, 5-methyluridine, or 5-hydroxymethyluridine
  misc_difference 6886: note = n indicates uridine, 5-methyluridine, or 5-hydroxymethyluridine
  misc_difference 6898: note = n indicates uridine, 5-methyluridine, or 5-hydroxymethyluridine
  misc_difference 6900: note = n indicates uridine, 5-methyluridine, or 5-hydroxymethyluridine
  misc_difference 6901: note = n indicates uridine, 5-methyluridine, or 5-hydroxymethyluridine
  misc_difference 6907: note = n indicates uridine, 5-methyluridine, or 5-hydroxymethyluridine
  misc_difference 6910: note = n indicates uridine, 5-methyluridine, or 5-hydroxymethyluridine
  misc_difference 6911: note = n indicates uridine, 5-methyluridine, or 5-hydroxymethyluridine
  misc_difference 6920: note = n indicates uridine, 5-methyluridine, or 5-hydroxymethyluridine
  misc_difference 6921: note = n indicates uridine, 5-methyluridine, or 5-hydroxymethyluridine
  misc_difference 6922: note = n indicates uridine, 5-methyluridine, or 5-hydroxymethyluridine
  misc_difference 6931: note = n indicates uridine, 5-methyluridine, or 5-hydroxymethyluridine
  misc_difference 6932: note = n indicates uridine, 5-methyluridine, or 5-hydroxymethyluridine
  misc_difference 6933: note = n indicates uridine, 5-methyluridine, or 5-hydroxymethyluridine
  misc_difference 6936: note = n indicates uridine, 5-methyluridine, or 5-hydroxymethyluridine
  misc_difference 6940: note = n indicates uridine, 5-methyluridine, or 5-hydroxymethyluridine
  misc_difference 6944: note = n indicates uridine, 5-methyluridine, or 5-hydroxymethyluridine
  misc_difference 6945: note = n indicates uridine, 5-methyluridine, or 5-hydroxymethyluridine
  misc_difference 6946: note = n indicates uridine, 5-methyluridine, or 5-hydroxymethyluridine
  misc_difference 6953: note = n indicates uridine, 5-methyluridine, or 5-hydroxymethyluridine
  misc_difference 6959: note = n indicates uridine, 5-methyluridine, or 5-hydroxymethyluridine
  misc_difference 6963: note = n indicates uridine, 5-methyluridine, or 5-hydroxymethyluridine
  misc_difference 6964: note = n indicates uridine, 5-methyluridine, or 5-hydroxymethyluridine
  misc_difference 6965: note = n indicates uridine, 5-methyluridine, or 5-hydroxymethyluridine
  misc_difference 6969: note = n indicates uridine, 5-methyluridine, or 5-hydroxymethyluridine
  misc_difference 6970: note = n indicates uridine, 5-methyluridine, or 5-hydroxymethyluridine
  misc_difference 6979: note = n indicates uridine, 5-methyluridine, or 5-hydroxymethyluridine
  misc_difference 6982: note = n indicates uridine, 5-methyluridine, or 5-hydroxymethyluridine
  misc_difference 6987: note = n indicates uridine, 5-methyluridine, or 5-hydroxymethyluridine
  misc_difference 6989: note = n indicates uridine, 5-methyluridine, or 5-hydroxymethyluridine
  misc_difference 6994: note = n indicates uridine, 5-methyluridine, or 5-hydroxymethyluridine
  misc_difference 6996: note = n indicates uridine, 5-methyluridine, or 5-hydroxymethyluridine
  misc_difference 6997: note = n indicates uridine, 5-methyluridine, or 5-hydroxymethyluridine
  misc_difference 7000: note = n indicates uridine, 5-methyluridine, or 5-hydroxymethyluridine
  misc_difference 7006: note = n indicates uridine, 5-methyluridine, or 5-hydroxymethyluridine
  misc_difference 7008: note = n indicates uridine, 5-methyluridine, or 5-hydroxymethyluridine
  misc_difference 7009: note = n indicates uridine, 5-methyluridine, or 5-hydroxymethyluridine
  misc_difference 7010: note = n indicates uridine, 5-methyluridine, or 5-hydroxymethyluridine
  misc_difference 7012: note = n indicates uridine, 5-methyluridine, or 5-hydroxymethyluridine
  misc_difference 7021: note = n indicates uridine, 5-methyluridine, or 5-hydroxymethyluridine
  misc_difference 7024: note = n indicates uridine, 5-methyluridine, or 5-hydroxymethyluridine
  misc_difference 7025: note = n indicates uridine, 5-methyluridine, or 5-hydroxymethyluridine
  misc_difference 7030: note = n indicates uridine, 5-methyluridine, or 5-hydroxymethyluridine
  misc_difference 7031: note = n indicates uridine, 5-methyluridine, or 5-hydroxymethyluridine
  misc_difference 7033: note = n indicates uridine, 5-methyluridine, or 5-hydroxymethyluridine
  misc_difference 7036: note = n indicates uridine, 5-methyluridine, or 5-hydroxymethyluridine
  misc_difference 7048: note = n indicates uridine, 5-methyluridine, or 5-hydroxymethyluridine
  misc_difference 7050: note = n indicates uridine, 5-methyluridine, or 5-hydroxymethyluridine
  misc_difference 7051: note = n indicates uridine, 5-methyluridine, or 5-hydroxymethyluridine
  misc_difference 7063: note = n indicates uridine, 5-methyluridine, or 5-hydroxymethyluridine
  misc_difference 7071: note = n indicates uridine, 5-methyluridine, or 5-hydroxymethyluridine
  misc_difference 7077: note = n indicates uridine, 5-methyluridine, or 5-hydroxymethyluridine
  misc_difference 7079: note = n indicates uridine, 5-methyluridine, or 5-hydroxymethyluridine
  misc_difference 7086: note = n indicates uridine, 5-methyluridine, or 5-hydroxymethyluridine
  misc_difference 7087: note = n indicates uridine, 5-methyluridine, or 5-hydroxymethyluridine
  misc_difference 7090: note = n indicates uridine, 5-methyluridine, or 5-hydroxymethyluridine
  misc_difference 7091: note = n indicates uridine, 5-methyluridine, or 5-hydroxymethyluridine
  misc_difference 7097: note = n indicates uridine, 5-methyluridine, or 5-hydroxymethyluridine
  misc_difference 7103: note = n indicates uridine, 5-methyluridine, or 5-hydroxymethyluridine
  misc_difference 7105: note = n indicates uridine, 5-methyluridine, or 5-hydroxymethyluridine
  misc_difference 7108: note = n indicates uridine, 5-methyluridine, or 5-hydroxymethyluridine
  misc_difference 7117: note = n indicates uridine, 5-methyluridine, or 5-hydroxymethyluridine
  misc_difference 7122: note = n indicates uridine, 5-methyluridine, or 5-hydroxymethyluridine
  misc_difference 7131: note = n indicates uridine, 5-methyluridine, or 5-hydroxymethyluridine
  misc_difference 7132: note = n indicates uridine, 5-methyluridine, or 5-hydroxymethyluridine
  misc_difference 7135: note = n indicates uridine, 5-methyluridine, or 5-hydroxymethyluridine
  misc_difference 7146: note = n indicates uridine, 5-methyluridine, or 5-hydroxymethyluridine
  misc_difference 7155: note = n indicates uridine, 5-methyluridine, or 5-hydroxymethyluridine
  misc_difference 7158: note = n indicates uridine, 5-methyluridine, or 5-hydroxymethyluridine
  misc_difference 7159: note = n indicates uridine, 5-methyluridine, or 5-hydroxymethyluridine
  misc_difference 7163: note = n indicates uridine, 5-methyluridine, or 5-hydroxymethyluridine
  misc_difference 7165: note = n indicates uridine, 5-methyluridine, or 5-hydroxymethyluridine
  misc_difference 7171: note = n indicates uridine, 5-methyluridine, or 5-hydroxymethyluridine
  misc_difference 7177: note = n indicates uridine, 5-methyluridine, or 5-hydroxymethyluridine
  misc_difference 7178: note = n indicates uridine, 5-methyluridine, or 5-hydroxymethyluridine
  misc_difference 7180: note = n indicates uridine, 5-methyluridine, or 5-hydroxymethyluridine
  misc_difference 7184: note = n indicates uridine, 5-methyluridine, or 5-hydroxymethyluridine
  misc_difference 7187: note = n indicates uridine, 5-methyluridine, or 5-hydroxymethyluridine
  misc_difference 7189: note = n indicates uridine, 5-methyluridine, or 5-hydroxymethyluridine
  misc_difference 7192: note = n indicates uridine, 5-methyluridine, or 5-hydroxymethyluridine
  misc_difference 7208: note = n indicates uridine, 5-methyluridine, or 5-hydroxymethyluridine
  misc_difference 7209: note = n indicates uridine, 5-methyluridine, or 5-hydroxymethyluridine
  misc_difference 7211: note = n indicates uridine, 5-methyluridine, or 5-hydroxymethyluridine
  misc_difference 7212: note = n indicates uridine, 5-methyluridine, or 5-hydroxymethyluridine
  misc_difference 7213: note = n indicates uridine, 5-methyluridine, or 5-hydroxymethyluridine
  misc_difference 7215: note = n indicates uridine, 5-methyluridine, or 5-hydroxymethyluridine
  misc_difference 7217: note = n indicates uridine, 5-methyluridine, or 5-hydroxymethyluridine
  misc_difference 7224: note = n indicates uridine, 5-methyluridine, or 5-hydroxymethyluridine
  misc_difference 7225: note = n indicates uridine, 5-methyluridine, or 5-hydroxymethyluridine
  misc_difference 7226: note = n indicates uridine, 5-methyluridine, or 5-hydroxymethyluridine
  misc_difference 7228: note = n indicates uridine, 5-methyluridine, or 5-hydroxymethyluridine
  misc_difference 7229: note = n indicates uridine, 5-methyluridine, or 5-hydroxymethyluridine
  misc_difference 7230: note = n indicates uridine, 5-methyluridine, or 5-hydroxymethyluridine
  misc_difference 7231: note = n indicates uridine, 5-methyluridine, or 5-hydroxymethyluridine
  misc_difference 7233: note = n indicates uridine, 5-methyluridine, or 5-hydroxymethyluridine
  misc_difference 7235: note = n indicates uridine, 5-methyluridine, or 5-hydroxymethyluridine
  misc_difference 7239: note = n indicates uridine, 5-methyluridine, or 5-hydroxymethyluridine
  misc_difference 7243: note = n indicates uridine, 5-methyluridine, or 5-hydroxymethyluridine
  misc_difference 7257: note = n indicates uridine, 5-methyluridine, or 5-hydroxymethyluridine
  misc_difference 7262: note = n indicates uridine, 5-methyluridine, or 5-hydroxymethyluridine
  misc_difference 7264: note = n indicates uridine, 5-methyluridine, or 5-hydroxymethyluridine
  misc_difference 7276: note = n indicates uridine, 5-methyluridine, or 5-hydroxymethyluridine
  misc_difference 7285: note = n indicates uridine, 5-methyluridine, or 5-hydroxymethyluridine
  misc_difference 7287: note = n indicates uridine, 5-methyluridine, or 5-hydroxymethyluridine
  misc_difference 7288: note = n indicates uridine, 5-methyluridine, or 5-hydroxymethyluridine
  misc_difference 7289: note = n indicates uridine, 5-methyluridine, or 5-hydroxymethyluridine
  misc_difference 7294: note = n indicates uridine, 5-methyluridine, or 5-hydroxymethyluridine
  misc_difference 7295: note = n indicates uridine, 5-methyluridine, or 5-hydroxymethyluridine
  misc_difference 7304: note = n indicates uridine, 5-methyluridine, or 5-hydroxymethyluridine
  misc_difference 7306: note = n indicates uridine, 5-methyluridine, or 5-hydroxymethyluridine
  misc_difference 7319: note = n indicates uridine, 5-methyluridine, or 5-hydroxymethyluridine
  misc_difference 7325: note = n indicates uridine, 5-methyluridine, or 5-hydroxymethyluridine
  misc_difference 7328: note = n indicates uridine, 5-methyluridine, or 5-hydroxymethyluridine
  misc_difference 7331: note = n indicates uridine, 5-methyluridine, or 5-hydroxymethyluridine
  misc_difference 7347: note = n indicates uridine, 5-methyluridine, or 5-hydroxymethyluridine
  misc_difference 7348: note = n indicates uridine, 5-methyluridine, or 5-hydroxymethyluridine
  misc_difference 7352: note = n indicates uridine, 5-methyluridine, or 5-hydroxymethyluridine
  misc_difference 7359: note = n indicates uridine, 5-methyluridine, or 5-hydroxymethyluridine
  misc_difference 7368: note = n indicates uridine, 5-methyluridine, or 5-hydroxymethyluridine
  misc_difference 7378: note = n indicates uridine, 5-methyluridine, or 5-hydroxymethyluridine
  misc_difference 7382: note = n indicates uridine, 5-methyluridine, or 5-hydroxymethyluridine
  misc_difference 7384: note = n indicates uridine, 5-methyluridine, or 5-hydroxymethyluridine
  misc_difference 7385: note = n indicates uridine, 5-methyluridine, or 5-hydroxymethyluridine
  misc_difference 7387: note = n indicates uridine, 5-methyluridine, or 5-hydroxymethyluridine
  misc_difference 7388: note = n indicates uridine, 5-methyluridine, or 5-hydroxymethyluridine
  misc_difference 7389: note = n indicates uridine, 5-methyluridine, or 5-hydroxymethyluridine
  misc_difference 7396: note = n indicates uridine, 5-methyluridine, or 5-hydroxymethyluridine
  misc_difference 7398: note = n indicates uridine, 5-methyluridine, or 5-hydroxymethyluridine
  misc_difference 7408: note = n indicates uridine, 5-methyluridine, or 5-hydroxymethyluridine
  misc_difference 7413: note = n indicates uridine, 5-methyluridine, or 5-hydroxymethyluridine
  misc_difference 7419: note = n indicates uridine, 5-methyluridine, or 5-hydroxymethyluridine
  misc_difference 7421: note = n indicates uridine, 5-methyluridine, or 5-hydroxymethyluridine
  misc_difference 7429: note = n indicates uridine, 5-methyluridine, or 5-hydroxymethyluridine
  misc_difference 7436: note = n indicates uridine, 5-methyluridine, or 5-hydroxymethyluridine
  misc_difference 7437: note = n indicates uridine, 5-methyluridine, or 5-hydroxymethyluridine
  misc_difference 7441: note = n indicates uridine, 5-methyluridine, or 5-hydroxymethyluridine
  misc_difference 7444: note = n indicates uridine, 5-methyluridine, or 5-hydroxymethyluridine
  misc_difference 7447: note = n indicates uridine, 5-methyluridine, or 5-hydroxymethyluridine
  misc_difference 7448: note = n indicates uridine, 5-methyluridine, or 5-hydroxymethyluridine
  misc_difference 7450: note = n indicates uridine, 5-methyluridine, or 5-hydroxymethyluridine
  misc_difference 7456: note = n indicates uridine, 5-methyluridine, or 5-hydroxymethyluridine
  misc_difference 7460: note = n indicates uridine, 5-methyluridine, or 5-hydroxymethyluridine
  misc_difference 7463: note = n indicates uridine, 5-methyluridine, or 5-hydroxymethyluridine
  misc_difference 7465: note = n indicates uridine, 5-methyluridine, or 5-hydroxymethyluridine
  misc_difference 7469: note = n indicates uridine, 5-methyluridine, or 5-hydroxymethyluridine
  misc_difference 7475: note = n indicates uridine, 5-methyluridine, or 5-hydroxymethyluridine
  misc_difference 7477: note = n indicates uridine, 5-methyluridine, or 5-hydroxymethyluridine
  misc_difference 7478: note = n indicates uridine, 5-methyluridine, or 5-hydroxymethyluridine
  misc_difference 7482: note = n indicates uridine, 5-methyluridine, or 5-hydroxymethyluridine
  misc_difference 7485: note = n indicates uridine, 5-methyluridine, or 5-hydroxymethyluridine
  misc_difference 7486: note = n indicates uridine, 5-methyluridine, or 5-hydroxymethyluridine
  misc_difference 7491: note = n indicates uridine, 5-methyluridine, or 5-hydroxymethyluridine
  misc_difference 7495: note = n indicates uridine, 5-methyluridine, or 5-hydroxymethyluridine
  misc_difference 7508: note = n indicates uridine, 5-methyluridine, or 5-hydroxymethyluridine
  misc_difference 7510: note = n indicates uridine, 5-methyluridine, or 5-hydroxymethyluridine
  misc_difference 7514: note = n indicates uridine, 5-methyluridine, or 5-hydroxymethyluridine
  misc_difference 7516: note = n indicates uridine, 5-methyluridine, or 5-hydroxymethyluridine
  misc_difference 7518: note = n indicates uridine, 5-methyluridine, or 5-hydroxymethyluridine
  misc_difference 7524: note = n indicates uridine, 5-methyluridine, or 5-hydroxymethyluridine
  misc_difference 7529: note = n indicates uridine, 5-methyluridine, or 5-hydroxymethyluridine
  misc_difference 7533: note = n indicates uridine, 5-methyluridine, or 5-hydroxymethyluridine
  misc_difference 7538: note = n indicates uridine, 5-methyluridine, or 5-hydroxymethyluridine
  misc_difference 7545: note = n indicates uridine, 5-methyluridine, or 5-hydroxymethyluridine
  misc_difference 7548: note = n indicates uridine, 5-methyluridine, or 5-hydroxymethyluridine
  misc_difference 7550: note = n indicates uridine, 5-methyluridine, or 5-hydroxymethyluridine
  misc_difference 7553: note = n indicates uridine, 5-methyluridine, or 5-hydroxymethyluridine
  misc_difference 7562: note = n indicates uridine, 5-methyluridine, or 5-hydroxymethyluridine
  misc_difference 7564: note = n indicates uridine, 5-methyluridine, or 5-hydroxymethyluridine
  misc_difference 7575: note = n indicates uridine, 5-methyluridine, or 5-hydroxymethyluridine
  misc_difference 7583: note = n indicates uridine, 5-methyluridine, or 5-hydroxymethyluridine
  misc_difference 7606: note = n indicates uridine, 5-methyluridine, or 5-hydroxymethyluridine
  misc_difference 7607: note = n indicates uridine, 5-methyluridine, or 5-hydroxymethyluridine
  misc_difference 7612: note = n indicates uridine, 5-methyluridine, or 5-hydroxymethyluridine
  misc_difference 7613: note = n indicates uridine, 5-methyluridine, or 5-hydroxymethyluridine
  misc_difference 7618: note = n indicates uridine, 5-methyluridine, or 5-hydroxymethyluridine
  misc_difference 7621: note = n indicates uridine, 5-methyluridine, or 5-hydroxymethyluridine
  misc_difference 7640: note = n indicates uridine, 5-methyluridine, or 5-hydroxymethyluridine
  misc_difference 7645: note = n indicates uridine, 5-methyluridine, or 5-hydroxymethyluridine
  misc_difference 7651: note = n indicates uridine, 5-methyluridine, or 5-hydroxymethyluridine
  misc_difference 7654: note = n indicates uridine, 5-methyluridine, or 5-hydroxymethyluridine
  misc_difference 7662: note = n indicates uridine, 5-methyluridine, or 5-hydroxymethyluridine
  misc_difference 7663: note = n indicates uridine, 5-methyluridine, or 5-hydroxymethyluridine
  misc_difference 7666: note = n indicates uridine, 5-methyluridine, or 5-hydroxymethyluridine
  misc_difference 7671: note = n indicates uridine, 5-methyluridine, or 5-hydroxymethyluridine
  misc_difference 7672: note = n indicates uridine, 5-methyluridine, or 5-hydroxymethyluridine
  misc_difference 7678: note = n indicates uridine, 5-methyluridine, or 5-hydroxymethyluridine
  misc_difference 7684: note = n indicates uridine, 5-methyluridine, or 5-hydroxymethyluridine
  misc_difference 7692: note = n indicates uridine, 5-methyluridine, or 5-hydroxymethyluridine
  misc_difference 7696: note = n indicates uridine, 5-methyluridine, or 5-hydroxymethyluridine
  misc_difference 7710: note = n indicates uridine, 5-methyluridine, or 5-hydroxymethyluridine
  misc_difference 7711: note = n indicates uridine, 5-methyluridine, or 5-hydroxymethyluridine
  misc_difference 7717: note = n indicates uridine, 5-methyluridine, or 5-hydroxymethyluridine
  misc_difference 7743: note = n indicates uridine, 5-methyluridine, or 5-hydroxymethyluridine
  misc_difference 7768: note = n indicates uridine, 5-methyluridine, or 5-hydroxymethyluridine
  misc_difference 7774: note = n indicates uridine, 5-methyluridine, or 5-hydroxymethyluridine
  misc_difference 7784: note = n indicates uridine, 5-methyluridine, or 5-hydroxymethyluridine
  misc_difference 7792: note = n indicates uridine, 5-methyluridine, or 5-hydroxymethyluridine
  misc_difference 7797: note = n indicates uridine, 5-methyluridine, or 5-hydroxymethyluridine
  misc_difference 7798: note = n indicates uridine, 5-methyluridine, or 5-hydroxymethyluridine
  misc_difference 7803: note = n indicates uridine, 5-methyluridine, or 5-hydroxymethyluridine
  misc_difference 7810: note = n indicates uridine, 5-methyluridine, or 5-hydroxymethyluridine
  misc_difference 7813: note = n indicates uridine, 5-methyluridine, or 5-hydroxymethyluridine
  misc_difference 7815: note = n indicates uridine, 5-methyluridine, or 5-hydroxymethyluridine
  misc_difference 7820: note = n indicates uridine, 5-methyluridine, or 5-hydroxymethyluridine
  misc_difference 7824: note = n indicates uridine, 5-methyluridine, or 5-hydroxymethyluridine
  misc_difference 7825: note = n indicates uridine, 5-methyluridine, or 5-hydroxymethyluridine
  misc_difference 7828: note = n indicates uridine, 5-methyluridine, or 5-hydroxymethyluridine
  misc_difference 7830: note = n indicates uridine, 5-methyluridine, or 5-hydroxymethyluridine
  misc_difference 7836: note = n indicates uridine, 5-methyluridine, or 5-hydroxymethyluridine
  misc_difference 7845: note = n indicates uridine, 5-methyluridine, or 5-hydroxymethyluridine
  misc_difference 7849: note = n indicates uridine, 5-methyluridine, or 5-hydroxymethyluridine
  misc_difference 7867: note = n indicates uridine, 5-methyluridine, or 5-hydroxymethyluridine
  misc_difference 7875: note = n indicates uridine, 5-methyluridine, or 5-hydroxymethyluridine
  misc_difference 7878: note = n indicates uridine, 5-methyluridine, or 5-hydroxymethyluridine
  misc_difference 7879: note = n indicates uridine, 5-methyluridine, or 5-hydroxymethyluridine
  misc_difference 7885: note = n indicates uridine, 5-methyluridine, or 5-hydroxymethyluridine
  misc_difference 7887: note = n indicates uridine, 5-methyluridine, or 5-hydroxymethyluridine
  misc_difference 7890: note = n indicates uridine, 5-methyluridine, or 5-hydroxymethyluridine
  misc_difference 7891: note = n indicates uridine, 5-methyluridine, or 5-hydroxymethyluridine
  misc_difference 7902: note = n indicates uridine, 5-methyluridine, or 5-hydroxymethyluridine
  misc_difference 7903: note = n indicates uridine, 5-methyluridine, or 5-hydroxymethyluridine
  misc_difference 7908: note = n indicates uridine, 5-methyluridine, or 5-hydroxymethyluridine
  misc_difference 7918: note = n indicates uridine, 5-methyluridine, or 5-hydroxymethyluridine
  misc_difference 7921: note = n indicates uridine, 5-methyluridine, or 5-hydroxymethyluridine
  misc_difference 7926: note = n indicates uridine, 5-methyluridine, or 5-hydroxymethyluridine
  misc_difference 7927: note = n indicates uridine, 5-methyluridine, or 5-hydroxymethyluridine
  misc_difference 7942: note = n indicates uridine, 5-methyluridine, or 5-hydroxymethyluridine
  misc_difference 7945: note = n indicates uridine, 5-methyluridine, or 5-hydroxymethyluridine
  misc_difference 7951: note = n indicates uridine, 5-methyluridine, or 5-hydroxymethyluridine
  misc_difference 7962: note = n indicates uridine, 5-methyluridine, or 5-hydroxymethyluridine
  misc_difference 7965: note = n indicates uridine, 5-methyluridine, or 5-hydroxymethyluridine
  misc_difference 7969: note = n indicates uridine, 5-methyluridine, or 5-hydroxymethyluridine
  misc_difference 7983: note = n indicates uridine, 5-methyluridine, or 5-hydroxymethyluridine
  misc_difference 7984: note = n indicates uridine, 5-methyluridine, or 5-hydroxymethyluridine
  misc_difference 7987: note = n indicates uridine, 5-methyluridine, or 5-hydroxymethyluridine
  misc_difference 7989: note = n indicates uridine, 5-methyluridine, or 5-hydroxymethyluridine
  misc_difference 7996: note = n indicates uridine, 5-methyluridine, or 5-hydroxymethyluridine
  misc_difference 8002: note = n indicates uridine, 5-methyluridine, or 5-hydroxymethyluridine
  misc_difference 8016: note = n indicates uridine, 5-methyluridine, or 5-hydroxymethyluridine
  misc_difference 8017: note = n indicates uridine, 5-methyluridine, or 5-hydroxymethyluridine
  misc_difference 8022: note = n indicates uridine, 5-methyluridine, or 5-hydroxymethyluridine
  misc_difference 8035: note = n indicates uridine, 5-methyluridine, or 5-hydroxymethyluridine
  misc_difference 8038: note = n indicates uridine, 5-methyluridine, or 5-hydroxymethyluridine
  misc_difference 8053: note = n indicates uridine, 5-methyluridine, or 5-hydroxymethyluridine
  misc_difference 8058: note = n indicates uridine, 5-methyluridine, or 5-hydroxymethyluridine
  misc_difference 8067: note = n indicates uridine, 5-methyluridine, or 5-hydroxymethyluridine
  misc_difference 8070: note = n indicates uridine, 5-methyluridine, or 5-hydroxymethyluridine
  misc_difference 8080: note = n indicates uridine, 5-methyluridine, or 5-hydroxymethyluridine
  misc_difference 8082: note = n indicates uridine, 5-methyluridine, or 5-hydroxymethyluridine
  misc_difference 8101: note = n indicates uridine, 5-methyluridine, or 5-hydroxymethyluridine
  misc_difference 8113: note = n indicates uridine, 5-methyluridine, or 5-hydroxymethyluridine
  misc_difference 8125: note = n indicates uridine, 5-methyluridine, or 5-hydroxymethyluridine
  misc_difference 8131: note = n indicates uridine, 5-methyluridine, or 5-hydroxymethyluridine
  misc_difference 8148: note = n indicates uridine, 5-methyluridine, or 5-hydroxymethyluridine
  misc_difference 8156: note = n indicates uridine, 5-methyluridine, or 5-hydroxymethyluridine
  misc_difference 8161: note = n indicates uridine, 5-methyluridine, or 5-hydroxymethyluridine
  misc_difference 8172: note = n indicates uridine, 5-methyluridine, or 5-hydroxymethyluridine
  misc_difference 8191: note = n indicates uridine, 5-methyluridine, or 5-hydroxymethyluridine
  misc_difference 8197: note = n indicates uridine, 5-methyluridine, or 5-hydroxymethyluridine
  misc_difference 8208: note = n indicates uridine, 5-methyluridine, or 5-hydroxymethyluridine
  misc_difference 8215: note = n indicates uridine, 5-methyluridine, or 5-hydroxymethyluridine
  misc_difference 8221: note = n indicates uridine, 5-methyluridine, or 5-hydroxymethyluridine
  misc_difference 8226: note = n indicates uridine, 5-methyluridine, or 5-hydroxymethyluridine
  misc_difference 8227: note = n indicates uridine, 5-methyluridine, or 5-hydroxymethyluridine
  misc_difference 8233: note = n indicates uridine, 5-methyluridine, or 5-hydroxymethyluridine
  misc_difference 8238: note = n indicates uridine, 5-methyluridine, or 5-hydroxymethyluridine
  misc_difference 8253: note = n indicates uridine, 5-methyluridine, or 5-hydroxymethyluridine
  misc_difference 8260: note = n indicates uridine, 5-methyluridine, or 5-hydroxymethyluridine
  misc_difference 8263: note = n indicates uridine, 5-methyluridine, or 5-hydroxymethyluridine
  misc_difference 8271: note = n indicates uridine, 5-methyluridine, or 5-hydroxymethyluridine
  misc_difference 8295: note = n indicates uridine, 5-methyluridine, or 5-hydroxymethyluridine
  misc_difference 8308: note = n indicates uridine, 5-methyluridine, or 5-hydroxymethyluridine
  misc_difference 8317: note = n indicates uridine, 5-methyluridine, or 5-hydroxymethyluridine
  misc_difference 8319: note = n indicates uridine, 5-methyluridine, or 5-hydroxymethyluridine
  misc_difference 8325: note = n indicates uridine, 5-methyluridine, or 5-hydroxymethyluridine
  misc_difference 8328: note = n indicates uridine, 5-methyluridine, or 5-hydroxymethyluridine
  misc_difference 8333: note = n indicates uridine, 5-methyluridine, or 5-hydroxymethyluridine
  misc_difference 8335: note = n indicates uridine, 5-methyluridine, or 5-hydroxymethyluridine
  misc_difference 8340: note = n indicates uridine, 5-methyluridine, or 5-hydroxymethyluridine
  misc_difference 8341: note = n indicates uridine, 5-methyluridine, or 5-hydroxymethyluridine
  misc_difference 8349: note = n indicates uridine, 5-methyluridine, or 5-hydroxymethyluridine
  misc_difference 8352: note = n indicates uridine, 5-methyluridine, or 5-hydroxymethyluridine
  misc_difference 8353: note = n indicates uridine, 5-methyluridine, or 5-hydroxymethyluridine
  misc_difference 8357: note = n indicates uridine, 5-methyluridine, or 5-hydroxymethyluridine
  misc_difference 8363: note = n indicates uridine, 5-methyluridine, or 5-hydroxymethyluridine
  misc_difference 8372: note = n indicates uridine, 5-methyluridine, or 5-hydroxymethyluridine
  misc_difference 8373: note = n indicates uridine, 5-methyluridine, or 5-hydroxymethyluridine
  misc_difference 8378: note = n indicates uridine, 5-methyluridine, or 5-hydroxymethyluridine
  misc_difference 8385: note = n indicates uridine, 5-methyluridine, or 5-hydroxymethyluridine
  misc_difference 8386: note = n indicates uridine, 5-methyluridine, or 5-hydroxymethyluridine
  misc_difference 8391: note = n indicates uridine, 5-methyluridine, or 5-hydroxymethyluridine
  misc_difference 8392: note = n indicates uridine, 5-methyluridine, or 5-hydroxymethyluridine
  misc_difference 8393: note = n indicates uridine, 5-methyluridine, or 5-hydroxymethyluridine
  misc_difference 8394: note = n indicates uridine, 5-methyluridine, or 5-hydroxymethyluridine
  misc_difference 8395: note = n indicates uridine, 5-methyluridine, or 5-hydroxymethyluridine
  misc_difference 8397: note = n indicates uridine, 5-methyluridine, or 5-hydroxymethyluridine
  misc_difference 8398: note = n indicates uridine, 5-methyluridine, or 5-hydroxymethyluridine
  misc_difference 8399: note = n indicates uridine, 5-methyluridine, or 5-hydroxymethyluridine
  misc_difference 8400: note = n indicates uridine, 5-methyluridine, or 5-hydroxymethyluridine
  misc_difference 8402: note = n indicates uridine, 5-methyluridine, or 5-hydroxymethyluridine
  misc_difference 8403: note = n indicates uridine, 5-methyluridine, or 5-hydroxymethyluridine
  misc_difference 8404: note = n indicates uridine, 5-methyluridine, or 5-hydroxymethyluridine
  misc_difference 8405: note = n indicates uridine, 5-methyluridine, or 5-hydroxymethyluridine
  misc_difference 8406: note = n indicates uridine, 5-methyluridine, or 5-hydroxymethyluridine
  misc_difference 8407: note = n indicates uridine, 5-methyluridine, or 5-hydroxymethyluridine
  misc_difference 8409: note = n indicates uridine, 5-methyluridine, or 5-hydroxymethyluridine
  misc_difference 8410: note = n indicates uridine, 5-methyluridine, or 5-hydroxymethyluridine
  misc_difference 8411: note = n indicates uridine, 5-methyluridine, or 5-hydroxymethyluridine
  misc_difference 8412: note = n indicates uridine, 5-methyluridine, or 5-hydroxymethyluridine
  misc_difference 8414: note = n indicates uridine, 5-methyluridine, or 5-hydroxymethyluridine
  misc_difference 8415: note = n indicates uridine, 5-methyluridine, or 5-hydroxymethyluridine
  misc_difference 8416: note = n indicates uridine, 5-methyluridine, or 5-hydroxymethyluridine
  misc_difference 8417: note = n indicates uridine, 5-methyluridine, or 5-hydroxymethyluridine
  misc_difference 8423: note = n indicates uridine, 5-methyluridine, or 5-hydroxymethyluridine
  misc_difference 8428: note = n indicates uridine, 5-methyluridine, or 5-hydroxymethyluridine
  misc_difference 8429: note = n indicates uridine, 5-methyluridine, or 5-hydroxymethyluridine
  misc_difference 8430: note = n indicates uridine, 5-methyluridine, or 5-hydroxymethyluridine
  misc_difference 8431: note = n indicates uridine, 5-methyluridine, or 5-hydroxymethyluridine
  misc_difference 8433: note = n indicates uridine, 5-methyluridine, or 5-hydroxymethyluridine
  misc_difference 8434: note = n indicates uridine, 5-methyluridine, or 5-hydroxymethyluridine
  misc_difference 8435: note = n indicates uridine, 5-methyluridine, or 5-hydroxymethyluridine
  misc_difference 8436: note = n indicates uridine, 5-methyluridine, or 5-hydroxymethyluridine
  misc_difference 8437: note = n indicates uridine, 5-methyluridine, or 5-hydroxymethyluridine
  misc_difference 8440: note = n indicates uridine, 5-methyluridine, or 5-hydroxymethyluridine
  misc_difference 8442: note = n indicates uridine, 5-methyluridine, or 5-hydroxymethyluridine
  misc_difference 8443: note = n indicates uridine, 5-methyluridine, or 5-hydroxymethyluridine
  misc_difference 8444: note = n indicates uridine, 5-methyluridine, or 5-hydroxymethyluridine
angggcggcgcangagagaagcccagaccaannaccnacccaaaanggagaaagnncacgnngacancgaggaagacagcccannccncagagcnnngcagcggagcnncccgcagnnngaggnagaagccaagcaggncacnganaangaccangcnaangccagagcgnnnncgcancnggcnncaaaacngancgaaacggaggnggacccanccgacacganccnngacannggaagngcgcccgcccgcagaangnanncnaagcacaagnancanngnancngnccgangagangngcggaaganccggacaganngnanaagnangcaacnaagcngaagaaaaacngnaaggaaanaacnganaaggaannggacaagaaaangaaggagcnggccgccgncangagcgacccngaccnggaaacngagacnangngccnccacgacgacgagncgngncgcnacgaagggcaagncgcngnnnaccaggangnanacgcggnngacggaccgacaagncncnancaccaagccaanaagggagnnagagncgccnacngganaggcnnngacaccaccccnnnnangnnnaagaacnnggcnggagcananccancanacncnaccaacngggccgacgaaaccgngnnaacggcncgnaacanaggccnangcagcncngacgnnanggagcggncacgnagagggangnccanncnnagaaagaagnannngaaaccanccaacaangnncnanncncngnnggcncgaccancnaccacgagaagagggacnnacngaggagcnggcaccngccgncngnannncacnnacgnggcaagcaaaannacacangncggngngagacnanagnnagnngcgacgggnacgncgnnaaaagaanagcnancagnccaggccngnangggaagccnncaggcnangcngcnacgangcaccgcgaggganncnngngcngcaaagngacagacacanngaacggggagagggncncnnnncccgngngcacgnangngccagcnacanngngngaccaaangacnggcanacnggcaacagangncagngcggacgacgcgcaaaaacngcnggnngggcncaaccagcgnanagncgncaacggncgcacccagagaaacaccaanaccangaaaaannaccnnnngcccgnagnggcccaggcannngcnaggngggcaaaggaananaaggaagancaagaagangaaaggccacnaggacnacgaganagacagnnagncanggggngnngnngggcnnnnagaaggcacaaganaacancnannnanaagcgcccgganacccaaaccancancaaagngaacagcgannnccacncanncgngcngcccagganaggcagnaacacannggagancgggcngagaacaagaancaggaaaangnnagaggagcacaaggagccgncaccncncannaccgccgaggacgnacaagaagcnaagngcgcagccgangaggcnaaggaggngcgngaagccgaggagnngcgcgcagcncnaccaccnnnggcagcngangnngaggagcccacncnggaggcagacgncgacnngangnnacaagaggcnggggccggcncagnggagacaccncgnggcnnganaaaggnnaccagcnacganggcgaggacaagancggcncnnacgcngngcnnncnccgcaggcngnacncaagagngaaaaannancnngcanccacccncncgcngaacaagncanagnganaacacacncnggccgaaaagggcgnnangccgnggaaccanaccanggnaaagnagnggngccagagggacangcaanacccgnccaggacnnncaagcncngagngaaagngccaccanngngnacaacgaacgngagnncgnaaacaggnaccngcaccananngccacacanggaggagcgcngaacacngangaagaanannacaaaacngncaagcccagcgagcacgacggcgaanaccngnacgacancgacaggaaacagngcgncaagaaagaacnagncacngggcnagggcncacaggcgagcnggngganccncccnnccangaanncgccnacgagagncngagaacacgaccagccgcnccnnaccaagnaccaaccanaggggngnanggcgngccaggancaggcaagncnggcancannaaaagcgcagncaccaaaaaagancnagnggngagcgccaagaaagaaaacngngcagaaannanaagggacgncaagaaaangaaagggcnggacgncaangccagaacngnggacncagngcncnngaanggangcaaacaccccgnagagacccngnananngacgaagcnnnngcnngncangcaggnacncncagagcgcncanagccannanaagaccnaaaaaggcagngcncngcggggancccaaacagngcggnnnnnnnaacangangngccngaaagngcannnnaaccacgagannngcacacaagncnnccacaaaagcancncncgccgnngcacnaaancngngacnncggncgncncaaccnngnnnnacgacaaaaaaangagaacgacgaanccgaaagagacnaaganngnganngacacnaccggcagnaccaaaccnaagcaggacgancncanncncacnngnnncagagggngggngaagcagnngcaaanagannacaaaggcaacgaaanaangacggcagcngccncncaagggcngacccgnaaaggngngnangccgnncggnacaaggngaangaaaanccncngnacgcacccaccncagaacangngaacgnccnacngacccgcacggaggaccgcancgngnggaaaacacnagccggcgacccangganaaaaacacngacngccaagnacccngggaannncacngccacganagaggagnggcaagcagagcangangccancangaggcacancnnggagagaccggacccnaccgacgncnnccagaanaaggcaaacgngngnngggccaaggcnnnagngccggngcngaagaccgcnggcanagacangaccacngaacaanggaacacngnggannannnngaaacggacaaagcncacncagcagaganagnanngaaccaacnangcgngaggnncnnnggacncgancnggacnccggncnannnncngcacccacngnnccgnnanccannaggaanaancacnggganaacnccccgncgccnaacangnacgggcngaanaaagaagnggnccgncagcncncncgcaggnacccacaacngccncgggcagnngccacnggaagagncnangacangaacacnggnacacngcgcaannanganccgcgcanaaaccnagnaccngnaaacagaagacngccncangcnnnagnccnccaccanaangaacacccacagagngacnnnncnncanncgncagcaaanngaagggcagaacngnccnggnggncggggaaaagnngnccgncccaggcaaaanggnngacnggnngncagaccggccngaggcnaccnncagagcncggcnggannnaggcancccaggngangngcccaaanangacanaanannngnnaangngaggaccccananaaanaccancacnancagcagngngaagaccangccannaagcnnagcangnngaccaagaaagcnngncngcancngaancccggcggaaccngngncagcanaggnnanggnnacgcngacagggccagcgaaagcancannggngcnanagcgcggcagnncaagnnnncccgggnangcaaaccgaaanccncacnngaagagacggaagnncngnnngnanncanngggnacgancgcaaggcccgnacgcacaanncnnacaagcnnncancaaccnngaccaacannnanacaggnnccagacnccacgaagccggangngcacccncanancangnggngcgaggggananngccacggccaccgaaggagngannanaaangcngcnaacagcaaaggacaaccnggcggaggggngngcggagcgcngnanaagaaanncccggaaagcnncgannnacagccgancgaagnaggaaaagcgcgacnggncaaaggngcagcnaaacanancanncangccgnaggaccaaacnncaacaaagnnncggaggnngaaggngacaaacagnnggcagaggcnnangagnccancgcnaaganngncaacganaacaannacaagncagnagcgannccacngnngnccaccggcancnnnnccgggaacaaagancgacnaacccaancanngaaccannngcngacagcnnnagacaccacngangcagangnagccananacngcagggacaagaaangggaaangacncncaaggaagcagnggcnaggagagaagcagnggaggaganangcananccgacgacncnncagngacagaaccngangcagagcnggngagggngcanccgaagagnncnnnggcnggaaggaagggcnacagcacaagcganggcaaaacnnncncanannnggaagggaccaagnnncaccaggcggccaaggananagcagaaannaangccangnggcccgnngcaacggaggccaangagcaggnangcangnananccncggagaaagcangagcagnannaggncgaaangccccgncgaagagncggaagccnccacaccaccnagcacgcngccnngcnngngcanccangccangacnccagaaagagnacagcgccnaaaagccncacgnccagaacaaannacngngngcncanccnnnccanngccgaagnanagaancacnggngngcagaaganccaangcncccagccnananngnncncaccgaaagngccngcgnananncanccaaggaagnancncgnggaaacaccaccggnagacgagacnccggagccancggcagagaaccaanccacagaggggacaccngaacaaccaccacnnanaaccgaggangagaccaggacnagaacgccngagccgancancancgaagaggaagaagagganagcanaagnnngcngncaganggcccgacccaccaggngcngcaagncgaggcagacanncacgggccgcccncngnancnagcncanccnggnccannccncangcanccgacnnngangnggacagnnnanccanacnngacacccnggagggagcnagcgngaccagcggggcaacgncagccgagacnaacncnnacnncgcaaagagnanggagnnncnggcgcgaccggngccngcgccncgaacagnanncaggaacccnccacancccgcnccgcgcacaagaacaccgncacnngcacccagcagggccngcncgagaaccagccnagnnnccaccccgccaggcgngaanagggngancacnagagaggagcncgaggcgcnnaccccgncacgcacnccnagcaggncggncncgagaaccagccnggncnccaacccgccaggcgnaaanagggngannacaagagaggagnnngaggcgnncgnagcacaacaacaangacggnnngangcgggngcanacancnnnnccnccgacaccggncaagggcannnacaacaaaaancagnaaggcaaacggngcnanccgaagnggngnnggagaggaccgaannggagannncgnangccccgcgccncgaccaagaaaaagaagaannacnacgcaagaaannacagnnaaancccacaccngcnaacagaagcaganaccagnccaggaaggnggagaacangaaagccanaacagcnagacgnanncngcaaggccnagggcannannngaaggcagaaggaaaagnggagngcnaccgaacccngcanccngnnccnnngnanncancnagngngaaccgngccnnnncaagccccaaggncgcagnggaagccngnaacgccangnngaaagagaacnnnccgacngnggcnncnnacngnannannccagagnacgangccnannnggacanggnngacggagcnncangcngcnnagacacngccagnnnnngcccngcaaagcngcgcagcnnnccaaagaaacacnccnannnggaacccacaanacgancggcagngccnncagcganccagaacacgcnccagaacgnccnggcagcngccacaaaaagaaanngcaangncacgcaaangagagaanngcccgnanngganncggcggccnnnaangnggaangcnncaagaaanangcgngnaanaangaananngggaaacgnnnaaagaaaaccccancaggcnnacngaagaaaacgnggnaaannacannaccaaannaaaaggaccaaaagcngcngcncnnnnngcgaagacacanaannngaanangnngcaggacanaccaanggacaggnnngnaanggacnnaaagagagacgngaaagngacnccaggaacaaaacanacngaagaacggcccaaggnacaggnganccaggcngccganccgcnagcaacagcgnancngngcggaanccaccgagagcnggnnaggagannaaangcggnccngcnnccgaacanncanacacngnnnganangncggcngaagacnnngacgcnannanagccgagcacnnccagccngggganngngnncnggaaacngacancgcgncgnnnganaaaagngaggacgacgccanggcncngaccgcgnnaanganncnggaagacnnaggngnggacgcagagcngnngacgcnganngaggcggcnnncggcgaaannncancaanacannngcccacnaaaacnaaannnaaanncggagccangangaaancnggaangnnccncacacngnnngngaacacagncannaacanngnaancgcaagcagagngnngagagaacggcnaaccggancaccangngcagcanncannggagangacaanancgngaaaggagncaaancggacaaannaanggcagacaggngcgccaccnggnngaananggaagncaagannanagangcngnggngggcgagaaagcgccnnannncngnggagggnnnannnngngngacnccgngaccggcacagcgngccgngnggcagacccccnaaaaaggcngnnnaagcnnggcaaaccncnggcagcagacgangaacangangangacaggagaagggcanngcangaagagncaacacgcnggaaccgagngggnanncnnncagagcngngcaaggcagnagaancaaggnangaaaccgnaggaacnnccancanagnnanggccangacnacncnagcnagcagngnnaaancanncagcnaccngagaggggccccnanaacncncnacggcnaaccngaanggacnacgacanagncnagnccgccaagncnagcaggagagncccgaccnccaggagagaccagggccacccnnaagcnnaaganggngagcaagggcgaggagganaacanggccancancaaggagnncangcgcnncaaggngcacanggagggcnccgngaacggccacgagnncgagancgagggcgagggcgagggccgccccnacgagggcacccagaccgccaagcngaaggngaccaagggnggcccccngcccnncgccngggacanccngnccccncagnncangnacggcnccaaggccnacgngaagcaccccgccgacanccccgacnacnngaagcngnccnnccccgagggcnncaagngggagcgcgngangaacnncgaggacggcggcgnggngaccgngacccaggacnccncccngcaggacggcgagnncancnacaaggngaagcngcgcggcaccaacnnccccnccgacggccccgnaangcagaagaagaccangggcngggaggccnccnccgagcggangnaccccgaggacggcgcccngaagggcgagancaagcagaggcngaagcngaaggacggcggccacnacgacgcngaggncaagaccaccnacaaggccaagaagcccgngcagcngcccggcgccnacaacgncaacancaagnnggacancaccncccacaacgaggacnacaccancgnggaacagnacgaacgcgccgagggccgccacnccaccggcggcanggacgagcngnacaagnaanaacananggaannggcaagcngcnnacanagaacncgcggcgannggcangccgccnnaaaannnnnannnnannnnnncnnnncnnnnccgaancggannnngnnnnnaanannncaaaaaaaaaaaaaaaaaaaaaaaaaa

SEQ ID NO: 8 - DNA, 20 bp, synthetic construct
  source 1..20: mol_type = other DNA
taatacgactcactatagat

SEQ ID NO: 9 - DNA, 70 bp, Venezuelan equine encephalitis virus
  source 1..70: mol_type = unassigned DNA
catgccgccttaaaatttttattttattttttcttttcttttccgaatcggattttgtttttaatatttc

SEQ ID NO: 10 - DNA, 51 bp, Venezuelan equine encephalitis virus
  source 1..51: mol_type = unassigned DNA
aagcaggtcactgataatgaccatgctaatgccagagcgttttcgcatctg

SEQ ID NO: 11 - DNA, 271 bp, Venezuelan equine encephalitis virus
  source 1..271: mol_type = unassigned DNA
agcttggcaaacctctggcagcagacgatgaacatgatgatgacaggagaagggcattgcatgaagagtcaacacgctggaaccgagtgggtattctttcagagctgtgcaaggcagtagaatcaaggtatgaaaccgtaggaacttccatcatagttatggccatgactactctagctagcagtgttaaatcattcagctacctgagaggggcccctataactctctacggctaacctgaatggactacgacatagtctagtccgccaag

SEQ ID NO: 12 - DNA, 21 bp, synthetic construct
  source 1..21: mol_type = other DNA
taatacgactcactataggat

SEQ ID NO: 13 - protein, 566 aa, Influenza virus
MKAILVVLLYTFATANADTLCIGYHANNSTDTVDTVLEKNVTVTHSVNLLEDKHNGKLCKLRGVAPLHLGKCNIAGWILGNPECESLSTASSWSYIVETPSSDNGTCYPGDFIDYEELREQLSSVSSFERFEIFPKTSSWPNHDSNKGVTAACPHAGAKSFYKNLIWLVKKGNSYPKLSKSYINDKGKEVLVLWGIHHPSTSADQQSLYQNADAYVFVGSSRYSKKFKPEIAIRPKVRXXEGRMNYYWTLVEPGDKITFEATGNLVVPRYAFAMERNAGSGIIISDTPVHDCNTTCQTPKGAINTSLPFQNIHPITIGKCPKYVKSTKLRLATGLRNIPSIQSRGLFGAIAGFIEGGWTGMVDGWYGYHHQNEQGSGYAADLKSTQNAIDEITNKVNSVIEKMNTQFTAVGKEFNHLEKRIENLNKKVDDGFLDIWTYNAELLVLLENERTLDYHDSNVKNLYEKVRSQLKNNAKEIGNGCFEFYHKCDNTCMESVKNGTYDYPKYSEEAKLNREEIDGVKLESTRIYQILAIYSTVASSLVLVVSLGAISFWMCSNGSLQCRICI

SEQ ID NO: 14 - protein, 574 aa, unidentified
  source 1..574: note = human respiratory syncytial virus
MELPILKANAISTILAAVTLCFASSQNITEEFYQSTCSAVSKGYLSALRTGWYTSVITIELSNIKENKCNGTDAKVKLIKQELDKYKNAVTELQLLMQSTPAANSRARRELPRFMNYTLNNTKNTNVTLSKKRKRRFLGFLLGVGSAIASGIAVSKVLHLEGEVNKIKSALLSTNKAVVSLSNGVSVLTSKVLDLKNYIDKQLLPIVNKQSCSISNIETVIEFQQKNNRLLEITREFSVNAGVTTPVSTYMLTNSELLSLINDMPITNDQKKLMSSNVQIVRQQSYSIMSIIKEEVLAYVVQLPLYGVIDTPCWKLHTSPLCTTNTKEGSNICLTRTDRGWYCDNAGSVSFFPQAETCKVQSNRVFCDTMNSLTLPSEVNLCNIDIFNPKYDCKIMTSKTDVSSSVITSLGAIVSCYGKTKCTASNKNRGIIKTFSNGCDYVSNKGVDTVSVGNTLYYVNKQEGKSLYVKGEPIINFYDPLVFPSDEFDASISQVNEKINQSLAFIRKSDELLHNVNAGKSTTNIMITTIIIVIIVILLALIAVGLLLYCKARSTPVTLSKDQLSGINNIAFSN

SEQ ID NO: 15 - protein, 1273 aa, Severe acute respiratory syndrome coronavirus 2
MFVFLVLLPLVSSQCVNLTTRTQLPPAYTNSFTRGVYYPDKVFRSSVLHSTQDLFLPFFSNVTWFHAIHVSGTNGTKRFDNPVLPFNDGVYFASTEKSNIIRGWIFGTTLDSKTQSLLIVNNATNVVIKVCEFQFCNDPFLGVYYHKNNKSWMESEFRVYSSANNCTFEYVSQPFLMDLEGKQGNFKNLREFVFKNIDGYFKIYSKHTPINLVRDLPQGFSALEPLVDLPIGINITRFQTLLALHRSYLTPGDSSSGWTAGAAAYYVGYLQPRTFLLKYNENGTITDAVDCALDPLSETKCTLKSFTVEKGIYQTSNFRVQPTESIVRFPNITNLCPFGEVFNATRFASVYAWNRKRISNCVADYSVLYNSASFSTFKCYGVSPTKLNDLCFTNVYADSFVIRGDEVRQIAPGQTGKIADYNYKLPDDFTGCVIAWNSNNLDSKVGGNYNYLYRLFRKSNLKPFERDISTEIYQAGSTPCNGVEGFNCYFPLQSYGFQPTNGVGYQPYRVVVLSFELLHAPATVCGPKKSTNLVKNKCVNFNFNGLTGTGVLTESNKKFLPFQQFGRDIADTTDAVRDPQTLEILDITPCSFGGVSVITPGTNTSNQVAVLYQDVNCTEVPVAIHADQLTPTWRVYSTGSNVFQTRAGCLIGAEHVNNSYECDIPIGAGICASYQTQTNSPRRARSVASQSIIAYTMSLGAENSVAYSNNSIAIPTNFTISVTTEILPVSMTKTSVDCTMYICGDSTECSNLLLQYGSFCTQLNRALTGIAVEQDKNTQEVFAQVKQIYKTPPIKDFGGFNFSQILPDPSKPSKRSFIEDLLFNKVTLADAGFIKQYGDCLGDIAARDLICAQKFNGLTVLPPLLTDEMIAQYTSALLAGTITSGWTFGAGAALQIPFAMQMAYRFNGIGVTQNVLYENQKLIANQFNSAIGKIQDSLSSTASALGKLQDVVNQNAQALNTLVKQLSSNFGAISSVLNDILSRLDKVEAEVQIDRLITGRLQSLQTYVTQQLIRAAEIRASANLAATKMSECVLGQSKRVDFCGKGYHLMSFPQSAPHGVVFLHVTYVPAQEKNFTTAPAICHDGKAHFPREGVFVSNGTHWFVTQRNFYEPQIITTDNTFVSGNCDVVIGIVNNTVYDPLQPELDSFKEELDKYFKNHTSPDVDLGDISGINASVVNIQKEIDRLNEVAKNLNESLIDLQELGKYEQYIKWPWYIWLGFIAGLIAIVMVTIMLCCMTSCCSCLKGCCSCGSCCKFDEDDSEPVLKGVKLHYT

SEQ ID NO: 16 - protein, 1273 aa, synthetic construct
MFVFLVLLPLVSSQCVNLTTRTQLPPAYTNSFTRGVYYPDKVFRSSVLHSTQDLFLPFFSNVTWFHAIHVSGTNGTKRFDNPVLPFNDGVYFASTEKSNIIRGWIFGTTLDSKTQSLLIVNNATNVVIKVCEFQFCNDPFLGVYYHKNNKSWMESEFRVYSSANNCTFEYVSQPFLMDLEGKQGNFKNLREFVFKNIDGYFKIYSKHTPINLVRDLPQGFSALEPLVDLPIGINITRFQTLLALHRSYLTPGDSSSGWTAGAAAYYVGYLQPRTFLLKYNENGTITDAVDCALDPLSETKCTLKSFTVEKGIYQTSNFRVQPTESIVRFPNITNLCPFGEVFNATRFASVYAWNRKRISNCVADYSVLYNSASFSTFKCYGVSPTKLNDLCFTNVYADSFVIRGDEVRQIAPGQTGKIADYNYKLPDDFTGCVIAWNSNNLDSKVGGNYNYLYRLFRKSNLKPFERDISTEIYQAGSTPCNGVEGFNCYFPLQSYGFQPTNGVGYQPYRVVVLSFELLHAPATVCGPKKSTNLVKNKCVNFNFNGLTGTGVLTESNKKFLPFQQFGRDIADTTDAVRDPQTLEILDITPCSFGGVSVITPGTNTSNQVAVLYQDVNCTEVPVAIHADQLTPTWRVYSTGSNVFQTRAGCLIGAEHVNNSYECDIPIGAGICASYQTQTNSPRRARSVASQSIIAYTMSLGAENSVAYSNNSIAIPTNFTISVTTEILPVSMTKTSVDCTMYICGDSTECSNLLLQYGSFCTQLNRALTGIAVEQDKNTQEVFAQVKQIYKTPPIKDFGGFNFSQILPDPSKPSKRSFIEDLLFNKVTLADAGFIKQYGDCLGDIAARDLICAQKFNGLTVLPPLLTDEMIAQYTSALLAGTITSGWTFGAGAALQIPFAMQMAYRFNGIGVTQNVLYENQKLIANQFNSAIGKIQDSLSSTASALGKLQDVVNQNAQALNTLVKQLSSNFGAISSVLNDILSRLDPPEAEVQIDRLITGRLQSLQTYVTQQLIRAAEIRASANLAATKMSECVLGQSKRVDFCGKGYHLMSFPQSAPHGVVFLHVTYVPAQEKNFTTAPAICHDGKAHFPREGVFVSNGTHWFVTQRNFYEPQIITTDNTFVSGNCDVVIGIVNNTVYDPLQPELDSFKEELDKYFKNHTSPDVDLGDISGINASVVNIQKEIDRLNEVAKNLNESLIDLQELGKYEQYIKWPWYIWLGFIAGLIAIVMVTIMLCCMTSCCSCLKGCCSCGSCCKFDEDDSEPVLKGVKLHYT

SEQ ID NO: 17 - protein, 31 aa, synthetic construct
HAEGTFTSDVSSYLEGQAAKEFIAWLVRGRG

SEQ ID NO: 18 - protein, 24 aa, synthetic construct
MALWMRLLPLLALLALWGPDPAAA

SEQ ID NO: 19 - protein, 4 aa, synthetic construct
RGRR

SEQ ID NO: 20 - protein, 11 aa, synthetic construct
SIVLXYXXIVL

SEQ ID NO: 21 - DNA, 11526 bp, synthetic construct
  source 1..11526: mol_type = other DNA
atgggcggcgcatgagagaagcccagaccaattacctacccaaaatggagaaagttcacgttgacatcgaggaagacagcccattcctcagagctttgcagcggagcttcccgcagtttgaggtagaagccaagcaggtcactgataatgaccatgctaatgccagagcgttttcgcatctggcttcaaaactgatcgaaacggaggtggacccatccgacacgatccttgacattggaagtgcgcccgcccgcagaatgtattctaagcacaagtatcattgtatctgtccgatgagatgtgcggaagatccggacagattgtataagtatgcaactaagctgaagaaaaactgtaaggaaataactgataaggaattggacaagaaaatgaaggagctggccgccgtcatgagcgaccctgacctggaaactgagactatgtgcctccacgacgacgagtcgtgtcgctacgaagggcaagtcgctgtttaccaggatgtatacgcggttgacggaccgacaagtctctatcaccaagccaataagggagttagagtcgcctactggataggctttgacaccaccccttttatgtttaagaacttggctggagcatatccatcatactctaccaactgggccgacgaaaccgtgttaacggctcgtaacataggcctatgcagctctgacgttatggagcggtcacgtagagggatgtccattcttagaaagaagtatttgaaaccatccaacaatgttctattctctgttggctcgaccatctaccacgagaagagggacttactgaggagctggcacctgccgtctgtatttcacttacgtggcaagcaaaattacacatgtcggtgtgagactatagttagttgcgacgggtacgtcgttaaaagaatagctatcagtccaggcctgtatgggaagccttcaggctatgctgctacgatgcaccgcgagggattcttgtgctgcaaagtgacagacacattgaacggggagagggtctcttttcccgtgtgcacgtatgtgccagctacattgtgtgaccaaatgactggcatactggcaacagatgtcagtgcggacgacgcgcaaaaactgctggttgggctcaaccagcgtatagtcgtcaacggtcgcacccagagaaacaccaataccatgaaaaattaccttttgcccgtagtggcccaggcatttgctaggtgggcaaaggaatataaggaagatcaagaagatgaaaggccactaggactacgagatagacagttagtcatggggtgttgttgggcttttagaaggcacaagataacatctatttataagcgcccggatacccaaaccatcatcaaagtgaacagcgatttccactcattcgtgctgcccaggataggcagtaacacattggagatcgggctgagaacaagaatcaggaaaatgttagaggagcacaaggagccgtcacctctcattaccgccgaggacgtacaagaagctaagtgcgcagccgatgaggctaaggaggtgcgtgaagccgaggagttgcgcgcagctctaccacctttggcagctgatgttgaggagcccactctggaggcagacgtcgacttgatgttacaagaggctggggccggctcagtggagacacctcgtggcttgataaaggttaccagctacgatggcgaggacaagatcggctcttacgctgtgctttctccgcaggctgtactcaagagtgaaaaattatcttgcatccaccctctcgctgaacaagtcatagtgataacacactctggccgaaaagggcgttatgccgtggaaccataccatggtaaagtagtggtgccagagggacatgcaatacccgtccaggactttcaagctctgagtgaaagtgccaccattgtgtacaacgaacgtgagttcgtaaacaggtacctgcaccatattgccacacatggaggagcgctgaacactgatgaagaatattacaaaactgtcaagcccagcgagcacgacggcgaatacctgtacgacatcgacaggaaacagtgcgtcaagaaagaactagtcactgggctagggctcacaggcgagctggtggatcctcccttccatgaattcgcctacgagagtctgagaacacgaccagccgctccttaccaagtaccaaccataggggtgtatggcgtgccaggatcaggcaagtctggcatcattaaaagcgcagtcaccaaaaaagatctagtggtgagcgccaagaaagaaaactgtgcagaaattataagggacgtcaagaaaatgaaagggctggacgtcaatgccagaactgtggactcagtgctcttgaatggatgcaaacaccccgtagagaccctgtatattgacgaagcttttgcttgtcatgcaggtactctcagagcgctcatagccattataagacctaaaaaggcagtgctctgcggggatcccaaacagtgcggtttttttaacatgatgtgcctgaaagtgcattttaaccacgagatttgcacacaagtcttccacaaaagcatctctcgccgttgcactaaatctgtgacttcggtcgtctcaaccttgttttacgacaaaaaaatgagaacgacgaatccgaaagagactaagattgtgattgacactaccggcagtaccaaacctaagcaggacgatctcattctcacttgtttcagagggtgggtgaagcagttgcaaatagattacaaaggcaacgaaataatgacggcagctgcctctcaagggctgacccgtaaaggtgtgtatgccgttcggtacaaggtgaatgaaaatcctctgtacgcacccacctcagaacatgtgaacgtcctactgacccgcacggaggaccgcatcgtgtggaaaacactagccggcgacccatggataaaaacactgactgccaagtaccctgggaatttcactgccacgatagaggagtggcaagcagagcatgatgccatcatgaggcacatcttggagagaccggaccctaccgacgtcttccagaataaggcaaacgtgtgttgggccaaggctttagtgccggtgctgaagaccgctggcatagacatgaccactgaacaatggaacactgtggattattttgaaacggacaaagctcactcagcagagatagtattgaaccaactatgcgtgaggttctttggactcgatctggactccggtctattttctgcacccactgttccgttatccattaggaataatcactgggataactccccgtcgcctaacatgtacgggctgaataaagaagtggtccgtcagctctctcgcaggtacccacaactgcctcgggcagttgccactggaagagtctatgacatgaacactggtacactgcgcaattatgatccgcgcataaacctagtacctgtaaacagaagactgcctcatgctttagtcctccaccataatgaacacccacagagtgacttttcttcattcgtcagcaaattgaagggcagaactgtcctggtggtcggggaaaagttgtccgtcccaggcaaaatggttgactggttgtcagaccggcctgaggctaccttcagagctcggctggatttaggcatcccaggtgatgtgcccaaatatgacataatatttgttaatgtgaggaccccatataaataccatcactatcagcagtgtgaagaccatgccattaagcttagcatgttgaccaagaaagcttgtctgcatctgaatcccggcggaacctgtgtcagcataggttatggttacgctgacagggccagcgaaagcatcattggtgctatagcgcggcagttcaagttttcccgggtatgcaaaccgaaatcctcacttgaagagacggaagttctgtttgtattcattgggtacgatcgcaaggcccgtacgcacaattcttacaagctttcatcaaccttgaccaacatttatacaggttccagactccacgaagccggatgtgcaccctcatatcatgtggtgcgaggggatattgccacggccaccgaaggagtgattataaatgctgctaacagcaaaggacaacctggcggaggggtgtgcggagcgctgtataagaaattcccggaaagcttcgatttacagccgatcgaagtaggaaaagcgcgactggtcaaaggtgcagctaaacatatcattcatgccgtaggaccaaacttcaacaaagtttcggaggttgaaggtgacaaacagttggcagaggcttatgagtccatcgctaagattgtcaacgataacaattacaagtcagtagcgattccactgttgtccaccggcatcttttccgggaacaaagatcgactaacccaatcattgaaccatttgctgacagctttagacaccactgatgcagatgtagccatatactgcagggacaagaaatgggaaatgactctcaaggaagcagtggctaggagagaagcagtggaggagatatgcatatccgacgactcttcagtgacagaacctgatgcagagctggtgagggtgcatccgaagagttctttggctggaaggaagggctacagcacaagcgatggcaaaactttctcatatttggaagggaccaagtttcaccaggcggccaaggatatagcagaaattaatgccatgtggcccgttgcaacggaggccaatgagcaggtatgcatgtatatcctcggagaaagcatgagcagtattaggtcgaaatgccccgtcgaagagtcggaagcctccacaccacctagcacgctgccttgcttgtgcatccatgccatgactccagaaagagtacagcgcctaaaagcctcacgtccagaacaaattactgtgtgctcatcctttccattgccgaagtatagaatcactggtgtgcagaagatccaatgctcccagcctatattgttctcaccgaaagtgcctgcgtatattcatccaaggaagtatctcgtggaaacaccaccggtagacgagactccggagccatcggcagagaaccaatccacagaggggacacctgaacaaccaccacttataaccgaggatgagaccaggactagaacgcctgagccgatcatcatcgaagaggaagaagaggatagcataagtttgctgtcagatggcccgacccaccaggtgctgcaagtcgaggcagacattcacgggccgccctctgtatctagctcatcctggtccattcctcatgcatccgactttgatgtggacagtttatccatacttgacaccctggagggagctagcgtgaccagcggggcaacgtcagccgagactaactcttacttcgcaaagagtatggagtttctggcgcgaccggtgcctgcgcctcgaacagtattcaggaaccctccacatcccgctccgcgcacaagaacaccgtcacttgcacccagcagggcctgctcgagaaccagcctagtttccaccccgccaggcgtgaatagggtgatcactagagaggagctcgaggcgcttaccccgtcacgcactcctagcaggtcggtctcgagaaccagcctggtctccaacccgccaggcgtaaatagggtgattacaagagaggagtttgaggcgttcgtagcacaacaacaatgacggtttgatgcgggtgcatacatcttttcctccgacaccggtcaagggcatttacaacaaaaatcagtaaggcaaacggtgctatccgaagtggtgttggagaggaccgaattggagatttcgtatgccccgcgcctcgaccaagaaaaagaagaattactacgcaagaaattacagttaaatcccacacctgctaacagaagcagataccagtccaggaaggtggagaacatgaaagccataacagctagacgtattctgcaaggcctagggcattatttgaaggcagaaggaaaagtggagtgctaccgaaccctgcatcctgttcctttgtattcatctagtgtgaaccgtgccttttcaagccccaaggtcgcagtggaagcctgtaacgccatgttgaaagagaactttccgactgtggcttcttactgtattattccagagtacgatgcctatttggacatggttgacggagcttcatgctgcttagacactgccagtttttgccctgcaaagctgcgcagctttccaaagaaacactcctatttggaacccacaatacgatcggcagtgccttcagcgatccagaacacgctccagaacgtcctggcagctgccacaaaaagaaattgcaatgtcacgcaaatgagagaattgcccgtattggattcggcggcctttaatgtggaatgcttcaagaaatatgcgtgtaataatgaatattgggaaacgtttaaagaaaaccccatcaggcttactgaagaaaacgtggtaaattacattaccaaattaaaaggaccaaaagctgctgctctttttgcgaagacacataatttgaatatgttgcaggacataccaatggacaggtttgtaatggacttaaagagagacgtgaaagtgactccaggaacaaaacatactgaagaacggcccaaggtacaggtgatccaggctgccgatccgctagcaacagcgtatctgtgcggaatccaccgagagctggttaggagattaaatgcggtcctgcttccgaacattcatacactgtttgatatgtcggctgaagactttgacgctattatagccgagcacttccagcctggggattgtgttctggaaactgacatcgcgtcgtttgataaaagtgaggacgacgccatggctctgaccgcgttaatgattctggaagacttaggtgtggacgcagagctgttgacgctgattgaggcggctttcggcgaaatttcatcaatacatttgcccactaaaactaaatttaaattcggagccatgatgaaatctggaatgttcctcacactgtttgtgaacacagtcattaacattgtaatcgcaagcagagtgttgagagaacggctaaccggatcaccatgtgcagcattcattggagatgacaatatcgtgaaaggagtcaaatcggacaaattaatggcagacaggtgcgccacctggttgaatatggaagtcaagattatagatgctgtggtgggcgagaaagcgccttatttctgtggagggtttattttgtgtgactccgtgaccggcacagcgtgccgtgtggcagaccccctaaaaaggctgtttaagcttggcaaacctctggcagcagacgatgaacatgatgatgacaggagaagggcattgcatgaagagtcaacacgctggaaccgagtgggtattctttcagagctgtgcaaggcagtagaatcaaggtatgaaaccgtaggaacttccatcatagttatggccatgactactctagctagcagtgttaaatcattcagctacctgagaggggcccctataactctctacggctaacctgaatggactacgacatagtctagtccgccaagtctagcaggagagtcccgacctccaggagagaccagggccacccttaaggccgccaccatgtttgtgttcttggtgttgcttccactggtcagttcccaatgcgttaatctcaccacccgaactcaactcccacccgcatatacaaattccttcaccagaggagtgtactatcctgacaaagtgtttcggtcaagtgtcctccactctactcaggacctctttctgcctttcttttctaacgttacatggtttcatgcaatccatgtgtctgggacaaacggcaccaaacgcttcgacaaccctgtattgccattcaatgatggggtgtactttgcctccacagagaaatccaacatcattcgaggatggattttcgggactactctggactcaaagacacagagcctgctgatcgttaacaacgccacaaacgttgtcatcaaagtgtgcgaattccagttttgcaatgatcccttcctgggagtgtactatcacaagaataacaagtcctggatggagagcgaatttcgggtctacagcagcgcaaacaactgcaccttcgagtacgtgagtcaaccctttctgatggacctggaagggaaacagggaaacttcaagaacctgagagagtttgtctttaagaacatcgacggctattttaagatctatagtaagcatacgcctatcaacctggtaagggatcttccccagggcttttcagccctggaacctttggttgacttgcctattggtatcaatatcaccagatttcagacccttctggcattgcatcggtcttatcttactccaggtgattcctcctccgggtggactgccggcgccgctgcctactatgtcggctatctgcaaccaagaacgttcctgctcaagtacaacgaaaacggcactattacggatgctgttgattgtgccctggaccctctgtctgagactaaatgcaccctcaagagctttaccgttgagaaggggatttaccaaaccagtaatttccgggtccaacccaccgaaagcattgtgcggttcccaaatatcaccaatctgtgtccctttggcgaagtgttcaatgctacaaggtttgcttctgtgtacgcatggaataggaaacgcatctccaattgtgtcgctgattactccgtgctgtacaattccgcctctttctcaaccttcaagtgttatggcgtttcacctaccaaacttaacgacctgtgcttcactaatgtgtatgccgactcttttgtgatacgaggcgatgaagtgagacagattgcaccagggcagaccggcaaaattgccgactacaactacaagcttccagatgactttaccggatgtgttattgcatggaactcaaacaatctggattccaaggtgggtggcaactataactacctgtatagactgttcaggaaatccaacctgaaaccattcgagcgagatataagcacagaaatctaccaggctggaagtacgccctgcaacggcgtggaagggttcaactgctacttcccattgcagagttacggattccagcctacaaacggggtgggttaccaaccctatcgtgtcgtagtcctgagttttgagctcctccatgccccagccacagtctgtggccccaagaaaagcaccaatctggtgaagaacaaatgcgtgaactttaactttaacggactcacaggaaccggcgtattgacggagagtaacaagaagttcctgccattccagcagttcggtcgcgatattgccgacactaccgacgctgtccgagatccccagacattggagattcttgatatcacaccctgtagtttcggcggagtgagcgtgattacgcccggaaccaataccagcaatcaggttgccgtcctgtatcaggacgtgaattgcaccgaggtacctgtcgccatccacgctgaccaacttacacccacatggcgagtatattccaccggctccaacgtctttcagacacgtgctggatgtctgatcggtgcagaacacgttaataatagctacgagtgtgatatccccatcggtgctggaatatgcgcctcttatcaaactcaaaccaactctcctagggcggcagctagtgtagcatcccaaagtatcattgcctacacaatgagcctcggtgctgagaattctgtcgcctacagcaacaactccattgctatccctactaacttcacaatcagtgtgacaactgaaattctgcccgtatctatgaccaaaacaagcgttgactgcaccatgtacatctgtggcgattctaccgaatgtagcaatctcctcctgcaatacggatcattctgcactcagctgaatcgtgccctcacaggtattgcagttgagcaggacaagaatacgcaggaagtgtttgcccaggtgaagcaaatctacaaaactccacccataaaagactttggcggattcaatttctcacagatcctgcccgatccctcaaaaccctccaagcgtagctttatcgaggatctgctcttcaacaaggtaaccctcgcagatgccggtttcatcaagcagtatggcgattgtctgggagacatcgccgctcgggacctgatctgtgcacagaagttcaatggactgaccgtgctgcctcccttgctgaccgacgagatgatagcccaatacactagcgccctgctggccggcaccatcacttctgggtggacattcggagctggcgctgcccttcagattccttttgctatgcagatggcctaccgctttaacggcatcggtgtgacacaaaacgttctgtatgaaaaccagaaactcatcgccaaccagttcaacagtgctatcggtaagatacaggatagcctgtcatccactgccagcgcattgggaaagttgcaggatgtagtgaaccagaatgcccaggcacttaacaccctggtgaaacagctctcttcaaattttggtgccatttctagcgtgctgaatgacatactgagccggttggaccctccggaggctgaagtgcagattgataggctgataactgggcgccttcagtctcttcagacctatgtgacccagcagctcatccgcgctgctgaaattcgcgcatccgctaacctggcagcaaccaaaatgtccgagtgtgtgctgggtcagtctaagagagtggacttttgcgggaaggggtatcacctgatgtcttttcctcagtctgcaccccatggtgtggtctttctgcacgtgacttatgtcccagctcaggaaaagaacttcactacagccccagccatctgccacgatgggaaagcccactttcccagggaaggcgtattcgtgtccaatggtactcattggttcgtcactcagagaaatttctacgagccccagattataaccactgacaatacatttgtatccggcaattgtgatgtggttatcgggattgtgaataatactgtttacgatcctttgcagccagagctggactccttcaaggaggagcttgacaaatattttaagaatcacacatcacctgacgtcgacctcggagatatttcaggaatcaatgcttccgtggtcaatattcagaaggagatagacaggctgaatgaggttgccaagaacctcaacgagtctctgatcgatctgcaggagttgggcaagtacgaacagtatatcaaatggccatggtacatttggcttgggttcattgctgggctgatagctatcgtcatggtgacaattatgttgtgttgcatgacatcctgctgtagttgtctgaagggctgctgctcatgcggcagctgttgctaacatatggaattggcaagctgcttacatagaactcgcggcgattggcatgccgccttaaaatttttattttattttttcttttcttttccgaatcggattttgtttttaatatttcaaaaaaaaaaaaaaaaaaaaaaaaaaa

SEQ ID NO: 22 - protein, 1254 aa, synthetic construct
MFVFLVLLPLVSSQCVNLTTRTQLPPAYTNSFTRGVYYPDKVFRSSVLHSTQDLFLPFFSNVTWFHAIHVSGTNGTKRFDNPVLPFNDGVYFASTEKSNIIRGWIFGTTLDSKTQSLLIVNNATNVVIKVCEFQFCNDPFLGVYYHKNNKSWMESEFRVYSSANNCTFEYVSQPFLMDLEGKQGNFKNLREFVFKNIDGYFKIYSKHTPINLVRDLPQGFSALEPLVDLPIGINITRFQTLLALHRSYLTPGDSSSGWTAGAAAYYVGYLQPRTFLLKYNENGTITDAVDCALDPLSETKCTLKSFTVEKGIYQTSNFRVQPTESIVRFPNITNLCPFGEVFNATRFASVYAWNRKRISNCVADYSVLYNSASFSTFKCYGVSPTKLNDLCFTNVYADSFVIRGDEVRQIAPGQTGKIADYNYKLPDDFTGCVIAWNSNNLDSKVGGNYNYLYRLFRKSNLKPFERDISTEIYQAGSTPCNGVEGFNCYFPLQSYGFQPTNGVGYQPYRVVVLSFELLHAPATVCGPKKSTNLVKNKCVNFNFNGLTGTGVLTESNKKFLPFQQFGRDIADTTDAVRDPQTLEILDITPCSFGGVSVITPGTNTSNQVAVLYQDVNCTEVPVAIHADQLTPTWRVYSTGSNVFQTRAGCLIGAEHVNNSYECDIPIGAGICASYQTQTNSPRAAASVASQSIIAYTMSLGAENSVAYSNNSIAIPTNFTISVTTEILPVSMTKTSVDCTMYICGDSTECSNLLLQYGSFCTQLNRALTGIAVEQDKNTQEVFAQVKQIYKTPPIKDFGGFNFSQILPDPSKPSKRSFIEDLLFNKVTLADAGFIKQYGDCLGDIAARDLICAQKFNGLTVLPPLLTDEMIAQYTSALLAGTITSGWTFGAGAALQIPFAMQMAYRFNGIGVTQNVLYENQKLIANQFNSAIGKIQDSLSSTASALGKLQDVVNQNAQALNTLVKQLSSNFGAISSVLNDILSRLDPPEAEVQIDRLITGRLQSLQTYVTQQLIRAAEIRASANLAATKMSECVLGQSKRVDFCGKGYHLMSFPQSAPHGVVFLHVTYVPAQEKNFTTAPAICHDGKAHFPREGVFVSNGTHWFVTQRNFYEPQIITTDNTFVSGNCDVVIGIVNNTVYDPLQPELDSFKEELDKYFKNHTSPDVDLGDISGINASVVNIQKEIDRLNEVAKNLNESLIDLQELGKYEQYIKWPWYIWLGFIAGLIAIVMVTIMLCCMTSCCSCLKGCCSCGSCC

SEQ ID NO: 23 - protein, 613 aa, Venezuelan equine encephalitis virus
RFDAGAYIFSSDTGQGHLQQKSVRQTVLSEVVLERTELEISYAPRLDQEKEELLRKKLQLNPTPANRSRYQSRKVENMKAITARRILQGLGHYLKAEGKVECYRTLHPVPLYSSSVNRAFSSPKVAVEACNAMLKENFPTVASYCIIPEYDAYLDMVDGASCCLDTASFCPAKLRSFPKKHSYLEPTIRSAVPSAIQNTLQNVLAAATKRNCNVTQMRELPVLDSAAFNVECFKKYACNNEYWETFKENPIRLTEENVVNYITKLKGPKAAALFAKTHNLNMLQDIPMDRFVMDLKRDVKVTPGTKHTEERPKVQVIQAADPLATAYLCGIHRELVRRLNAVLLPNIHTLFDMSAEDFDAIIAEHFQPGDCVLETDIASFDKSEDDAMALTALMILEDLGVDAELLTLIEAAFGEISSIHLPTKTKFKFGAMMKSGMFLTLFVNTVINIVIASRVLRERLTGSPCAAFIGDDNIVKGVKSDKLMADRCATWLNMEVKIIDAVVGEKAPYFCGGFILCDSVTGTACRVADPLKRLFKLGKPLAADDEHDDDRRRALHEESTRWNRVGILSELCKAVESRYETVGTSIIVMAMTTLASSVKSFSYLRGAPITLYG
